United States Patent Application Publication US 2020/0329713 A1 - sequence listing, part 13

SEQ ID NO: 4 - DNA, 6648615 bp, Bacillus thuringiensis (residues 3,324,309-4,986,462 of 6,648,615)
agatagagtgcgaaagggagaaacaagggcgtaacccacaacctaaatattatgtggttaatcaagacgagccgtatgcagaggaagttctaaacattataaaaaagcacgaaggtgaaatataacaaaatctttatttgatagggggagacaaaatgggctgggagaaagtaattgagcaaaaggaaatgacaacaatcgaaaaactacacctgatatgtgacgctagtttagtacaagggaagagcatagtagttgaagcgaacagttttgcttggatgattcggactattaaggaacttagtaaggagggaaacaagtgatttatgaagtcatagattattgctctagatgtgatgagaaattagaaaactgtgagtgtgaatgcaggaagtgtgatgagtggttacacgattgtaaatgtgaagagaccaaataaattcgttatttgaaaggataaaacaatatggatcatacacttacagatattaaagatgctatttttttcatcgaaaaagatggtaagccgatgaaagtggcggaagtaaagggtgttgagtttaattttaagttcgaaagcaagcatagtgtagaaatcccgcaaaaaacaagtttcagttttgaatccgagctaccagatatagtaaaggaattaatgggtatgggatttactccgcagcaagcatggaatattcattttcgccaaaggagtaaatggaaagcacttcaagaagagttaacaaatgaattagatatgatgcaattgcttgataaggtaattggtcgtgttgaggaattagagtgtttattagaagaaattaaatgctatgaagcttattgctggggtaatgatcggaattttattgatgccagaattaagcaagctttttcataaaatcgtaatttggttagaggtgaataatcataggctactatgaaatgggattagaaattgctgcaatttggttgtcttttgatatgcaaagcggggaaataacagataactatagagataatgttcattgtaagaatctaaatgaacaggagttgaagtgggtagttaatagagcgaaagaacagttggaaaaagataaaaactgaacaaaaacgctattttattagaaaaggagaatgaatgatgaaaacatttactgtaacgtatacggaaactaaggtgtatgagggaattgtagaagcggaaacattagaacaagcagctgatcgcgttcgtgatggatatgtcgaagaagaggtgctagttgaaaaagacataactatcgatgagctaaaactggaacaaacggaagaaccggataacgttcgaagtttggttataaattacggagaacttagttttacgaattttgaacatgctgtaaatgttctttcagaggagtatggatttgaaggtgaagcatgggaaatggttgtagcgagtggagacttagaaatattatgtgagtttctaagcgaagatggtataagtgcagaaatcgaataaaaacttcattttagtagaaaaggagaatgaaagatggaaattacggttaatgaaacgggatttaatgaagaaagaatgagaaaaggtaaagtaacgattgttacaaaagctaatacatttacgatccatacagattatgtagatgatgcttattatctagctagcgtactagaagatgtagcagaggaaattgaagttaaagaaaactgaacaaaaatttcattttgtagaaaaggagaatggatatggatataggtatgaatgaccaaactgtaatcgttagtattccaccagtagaaaagtggccgttaaaacaacttaaatcagtttgtagacataacaaaataaaaggttacacaaaaatggatcgtgaagagttagtgcaacatgtaaaagaaataatcaagagcatgaagcctattaaagagggggaattgatatgaaatactttgagtttgataaacatggatattgggcaatggttgcagcagaggatgaagataaagctatcgaggtttatgtagaagaagttgctggagaaagcattaaggaaatagaagaagagggagaacctacagaaataacaagagagcaagcattaaacagatatattgaatcgtcaatttcagtagcaggatatttaacgattgaagaaataacaaaagaatttaatgagcgtaagaatacaacattactaattgattcgtcactaacataaaagagcagctagcaaaagctaactgctcatctccaagggggaacaaggagaaagtaacttaatgggttgtctacagtattgacggaatattgagttttattcaggggaggaacaagaaaatgagaaaaattaaatgtcgtggaagagatgaaagagggaagtggcattatggttattatgttgatggttatatgtttgatggcatgctaggtctttgggagtcagttccatttatagtccaaagccaattagagggtgatgttcgagttgaagctgaaacagttggtcaatatacaggcgtagaagataagaacggcaaggcaatttacgaaggtgatattgtcaaatgtcataacgatttagtctacagagttgattggcacgaaaaggacgctatgttttactacaaagatccagatggagatgaggatgaagatttgagaatgagtgcagtgtcattcgaagtaataggaaatgtatatgacaatcaaaacttaataaaataatccttttaaagtaaagcaaacagaatatagtccggctagaaaactagaggacaccaattcattaaagcagtaattaaagctgttttaggaataggtgtcctctttattttgaaaagggagatggggaaatgaaggggttaagagatcaattgcgtgaatggaaaaagcaaacaaataaagcaaagaagaaaaagaagaaaaaacgaaaagagaaatttagcactcgtgatattgaagatttaatgggcatgcatagaccttgttatgaacgaagacgtggagcaataagacaaaagtaatctaaaaataaaaaggagtggtcttacatgactaaacaattatctttcttaccaaaaatcgatagaacagcgacacaagaggaattagaaggtgtgttggaaagcgtacgtatacatagacaatttgggatgatgcgtaaagaaatgaaagtcactccttcttatgaaatacgtgagcatggtcctacacatacagttggaaaaccattagaagatgttgctttagcaaatattcaacaaagtaaacgagaagagtggcttgaaagaatgtcagtacgtatcgatcagtttctaaatcgattaggaaatggacgtgctggaagtatccaaagagatattatttataaacgttatttagaagaagaggacgtatgtgattacatggtttataacgaaatagggatgtcagagcgtacttatcgccgttggaagtctaaagcattttataagcttgcttttgcacttggattagaagtttacgagacagaagaaacgggaggtaatgaataatgaattttgttcaaccgatacgtgatccggagcaaatacagcagctaaaagattattttaaggaaaagagcttacgtaattacattctcttcattatgggaattaatacaggcctgagaatctcggacattttgaaattgaaggtaggagatgtcaaaggtagtcatatatctatgagagaaaagaaaacagggaaacagaaacgaatacaaattactgcagcactgaaaagagaacttaaatggtttattgaagaaagagaagataatgagtatttattgcaaagtagacaaggtaaaaatcgtccaattggtcgtagtatggcatataagatattaagcggagcagcggcagagtttgggctagatgaaataggaacacatacactgagaaagacgtacgggtatcatatgtacatgcaaacgaaaaacatagcattacttatggagatattcaatcactcgtcagagaaggtcacgttacgttatataggtgtaaaccaagatgcaatggataaagcaatgactagatttaaaatctaagcattgcttttctttttaaatctatacagttactcataaatttcgtactgtgtaactcaaaagagaaagtgaaacaaaatcaatgatatcaaggggtttggcgaaggggtcagttacacacaatacaagatatgggtaagtcattagaggaaaaacaggaggagtaagtagttgccaaaaactactgatttgggtaaaacagttgcaaagagtaggtcaggatattgatagggaaaaataagtggcagagtcgtgaccgctttttggcaggaaatgtgccggttgttttggaatttacgtgatatatttgtattgtgagaagtggcggaaaacacaactcataaagattcctttataatttatatgttgtttaaacgattccgtaatggtagcaaattaaatccgaaaccagcagatggtaacgattgaatgataccattattaaggagagcttttgctcttctttgagctaacaacatcctaggtagacagaattaggataacctgataagttttccgatggtgtctgtcgtggttgttagctgaaagaagaataaaacttcacataccgtaatcaaaatgcaaatcaataaatgataacaaagcatccattcgggtgctttttattttggaggaggatgagggatggataatcaatatcttgcggaaagaatcaatcaattagaaaaaacagttaatgatttagatagtgtgaatcgagatcaacaaaaagtgattaacgaattatctatgagaattgaaggtgtaatcaacacgattgatcatttaaaaaaggaattaagcgctaaaatgaacgatcttcccaaagatgcgcaagaaaagatagagcgattaaagaaagccgcggagggaattgtagatggctaataataaattaaagattaatatagatactgaaactaatacatctgaagcgttaaaacaaatgaaggaagtaactgaagttgctaatgaatgtgtggccgcattagagaagttggaaaaggttattggtaggtttactaataataatgattcgattgaaatagaagttcctctctttctaaatggaaagcaaatagctgaagctattactaaggttgaaccgtctgggaaatctcagattgcacttgctaaggagaaagagttacaggatcattatgaatgcgaatggtgtcataaagataaagctatccatattatcaaagaccttcgttatggtgaagaaagaaagatatgtacgtcttgctatctatctattgctcagaaggtagtgtctaacaatatggcagataaaatgcggaagaatatatgatgttgtggttattaggttatttaattgtaggtatgatatatgtttcttttggtatgcaaccagctttacgtaagatgttaaaagaagaagagggtgatactaaacaagaagcaattactattgtagtaatgctcttagtcattggaatcttcacacctgtttggccagcgttagtaaccatgaagattgctggtgtgttttataaaaacaaatataaggagtgaggaggtgaatacattcttacacaatgtaatcggtgtaaatgaagctgcatctattctcaatgtatcatctggtcatgttaagaacttatgcgctgaaggaaagattgttgcaaagaagataggtaagacatgggtgattgataaatcgagattaagaggagtgagataaggatgaaagtagtaattaacaacattggctttgaaacaatagatgtacttacaaacaattccacgaaggtttttagtcagatagaaacagtatttgtaaggtacactgtggttaaaggtaaacatgaattgtcaggtgtaacaagtctcgaatttagtgaatataaacacttccactacaacaaccttatcgatcatattataaatggattgattgtggatagtaatcatgttactgaagatatgtaagtgtggtaagacagtaccgatggaacaaggtatgtgcgaggagtgtgctgttgttactgaagaaagaaggaaacaaaggcacagagattacaaggcgaagcgaacggatacggacaaccagaagttctataactcaaagccttggcgagtaactagagcaagggtaaaggatagagacaatgggttgtgtcaactatgttggagtgagaacaaggttaaaccaatgaacacagtacatcatattattcctttagaagaaaataatcgattagctttagtaagaagtaatttgatttcattgtgtgagaaatgccaccagaaagtccataagctgtatgacgttaggacagagaagttcaatatacagaagaagttaagaagtttgatagggtagggggatatcaaaaacttttcaaggagggcgacgagtcgccgggtggtcttttttttcgcgaaaactccctaaatgaaaattccgaaaggaggaaggtggatggctagaccgagagaacctgtggatttagttgtactcaaaggaaaaaaacatttaacaaaagctgaaattgcaaatcgtaaatcaaaagaaatcaaggcgcctagtgataagattagggcgccttcttatttaccaaaagatttgagaagagactttaaaaaaatatccgatgagctaatcagaattgaaatcatgtccaatcttgatgttgatgctttagcaagatttttaatagcaaggaaaatgtatgtagaaattacaaatgctatgcttgagcttagtccgttagaagaagtggtggatgtaaaaaaggatcaggaaggtaacatcatatctgagaataggtataccgtatctaacggcgtgtattcagacttacttataaatcaagacaaactttttaaacaatgtagacaagcttccagcgatttaggtttaacaattacatcaagatgcagattagtagttccaaaacagaacgatgaaaaacctcaaaataaatttaataagtttatgtaggtaagttgtatgaatagggtcacacagtatgctcttgatgtattagaaggtcgagaaattgcagggaagtacgttaagttagcttgccaaaggcacttagatgatttggaaaaaagtaagttggcgccgttcgtctattattttgatgaggaaaaggcagatcggttacttgagtatgctgaaactttaatgataggtgaaggagaagaagtagaaccacttactttagcatcattccaagcatttatttttggatcattacatggttgggtccataaagaaacgggttatcgtagatttagaagtagttatgttcaagtgggcagacaaaatggtaaatctatgatgaatggtgtattagggacatattatagcaattttgatggctataattatgcgcaagtatactgtacagctacaaaacaggatcaagcaaacatagttctcaaagaaatgattaagttcattgaaacagatgaagatttaagtgagtgtttcaaggtgaaagaatataaaaataccattgaagcacttgtaacaaatggagttgtccgtgctctgggaagagatacggagagtatagatggatttcgcgcttaccttggcattgtggatgaataccataaacaccctacaaatcaaatgtataaattattggagggtggaacaactaaattaaaagaatgcttaatatcagttatcacaacagcaggatttgatttaaacagtccttgctacgagttgtatgaagattgttgtagacttcttgaaggtgtatatgaagacgataaacagtttgtatatattgctcaattagataaagatgatgatatttgggattcaagtaattggataaaagctaatcctttagtagcaagagatcaagaaggaatagaaacacttttaactatggcaagtgcagcaaaacgtaggggcggaagtgaacttcgcaatttccttacaaagcacttaaatatttgggtacaattcacagacaatcaatatatgaacatggaacattggaaaaaatgtgcttcagatttagatttagaggattttagagggaaagagtgttatttaggtctggatttatctagcggtggtgatttaacgagtttaggggcagtattcccatatttaaaagaagaagtgaaaaattatttcgtacattctcatagttttattcctaaaaatcgtgtaaaagaacatatagagactgataaagctccttatgacatctggattagagatgggttattaactgttacagagacattagggggtattaaaacagattataaatatataatcgcttatataaaaagaattgtagaagagtacgagttaattgtaaatataatagcatacgatccccacaatgcagatgcctttttgaatgatcttgaagagcttggatataacagcatcatgattgtccaatcagcaaagaatttaaatgatgctacagtcgattttagactagaggttgaggctaaaaacattcaatataatcgtaaaaataaattgttaacatggagtatagccaacgcaaagacagtatccaatagtttcggtgaaatcaagatcgataaacacttaaaagagaaaagaattgatccaattgatgcggttattgatgcatataagatggcaatgaagggagaagtaggattgaaattaagccaatatgttacggatgaaaatctagataaacttggttggtaaaggaggtgagtgaatgtgggaatggctcaataaattaaaacctaagaaggttcaaaactcagtatcacttgattcggacgagtttttaaagatgttaggtattgatataggtagtgtaaataaaaataaattaagtgaaatcacatattttacctgtttaaggcttttatctgaaagtattgggaaattacctttaaaattatatagagatacaaataacggtcttgaaaaagcaacagatcataatttgtatacacttttaaaaatgcggcctaatccatatatgacttcaagtacattttggtctacagtagaagcaaataaaaatcattatgggaatgcgtatgtctatgttaatacggagagggataaagtaaaagatttgtggattcttcctagcgaacacgtacagatttggattgataatgcaggtatattccaaagggaaaatgcgatttggtatatatggggagataataaatctggtaaacaatataggtttcgatatgatcaggttatgcattttaaaacttcattatctttagatggtatatctggtttagcagtaaaagacatattgaaggtatcaattgagaacatacaaagtggagctttatatctcaataactatttttcaaatggtttaatgggaaaggcagttgtccagtatactggtgatttggatcatgacaaagcaaagaaaatggtagcaaaaattgaagaatttagtaatggtttgaaaaatgcaggaagaattgtcccgctaccattaggttttcaactcactccattaaatgtgaacatggcagatgctcaattcttagagattaacaaatatacagcactacaggttgctggggcatttggtattaaacctgcacaagtaaataattatgataagggtaactatgcaaatgttgaaacgcaacagcgttctttttacgtagatacccttttatatattttgaaaaattacgaggaagaaatgagttataagcttcttcttagtgatgaatttcaaaatggatattgctttaaatttaatgtgaatggtattttacgtgctgatttcgcaatacagatggaaggcctatcaaagggtgtaaacaatgctatttatactccaaatgaggcaagagaatttgtagatttgccgcgtaaagatggcggggattcattaatgtgtaatggaaactatgttccattagtatcagttgagaaagaccaactatgagaagtcaaggggagttttttatataaatagggggtgttttaaataccctatagaatagacttttttcaagtgtctattctatagggtacattttattttgtacagctacctttttcatatggtgaatttttaatagatattctatcagccataagttacattcttcatatttgagcttctttgaattcaataatacttaatcagcttgtcttattacttcacttaacgtaacgagattcatcttatagcaactacaacacgctttattattaataatactactcttcttattttaactttaattccattgccttgattttttaataataaatatacaacttagtaatgataatagatatacaataagaataatatacaactgttttggttcaatgctatcgatataaagactcataattggatatgaccaaggaaacagtatccaatagtttgtatgagagataaaaaaactacccagtccacctataacccctactaataatgaaagtaacgggattttataaaatattatatttattaaaaaatgtagattcacaatagttaaagagctaatcaccataaaaagtatagaaaaaattaacctttgataaacagtcccaagattatcagccgttaatactataggtatactagttatgactaaagcacatattaaataaccaaaggtaatcattaagcaaaacaaaaacttattacttaatatagtttttaaagtgattccatgataaatagcagacatatatccttttcttctgaattcgtttacaaaagaaaatgacactaatagacctattgcaataggtaaaaataatctacaaaaaagacttagaatcgctatatgcatgaaaacgccatcttttgattgagatgatacagttagaaagatttgaaaactaattggtatcaacagaaatactagtaacaggatatacaatccattatgaagactttttttatattcacctaatatacccacttatttcaccctttattattcatatgtataatatttaaaactcacagctaataacataattcctaaaatatagattgaagaacttgcaagatatattaaaatagttgtttctttcatcattacatcacttactatattcaatgcataaaatattggaaatgtctttgtgaatactacaggaaataatccataagttacgctaaaaaaaatccaaataactgacaaggacgccgcaagaattcccttttttataattaaatgaaaaagcaattgagaatatggtattgctaaagataaaatggtacaaagtaacaacatttttaaaaaatacagtatagatatttcatatccatttataaaaatatagacacccataactgaaaaatttaaaatattaaagattaaataaaacagtataaacaataaatttttagctaccaataacttgaattttgaaatgggttttgtataaataatagcccaagtaccatatttattttcagaagaaatgataaaataccacatacaagcagaaaaaatgcttaatgttagtgtattaaagtttactgtaattgctataagattggtagattgaaacatatcgggattattcttgttaaaaataaaataacttatacacaaaaagcttgataataatgaaaaaaacaaagaaaataacaataattttctcccaccaattttcctcatctcactattcacacttttaaagataaattgcattatgatagtaactccttttgtttagttaaagataaaaatacttcctctaatgttagctttttagggctaacttcaaaaatatctatatcattttcaattaatattctggttaaattaggaacactattttgatctatcattagtttgaataccccttctttttctatgctataaggtatatcctttgtatttaaaatcctttctgtggcagtagtgtcattaacatgaacaatatattctctagaagtaataatactgtttaaattcccttcatagagtaagttacccttatgtagtaatgctatgtgatctgctatcatttcaatttcagctaaattatgactagaaataaatattgtcttcccctcattttttactaaatgaagtaataagcgccttatctcgtgtactccctctgggtctaatccatttgtcggctcatcaagaattagtattttaggatcattaagaatagcaaaggaaatacctagcctttgtttcattcctaaagaaaaatctttcacttttttatcttttgctttatatattcctgtaatttttaatactctgtctatttcatctaaaggcttattaatcattttttgtacataggctaaattttcatatgctgtcaaattaggatagtaggtaggtgaatcaataaaacaacccacattttcaaataattcttctttccaatctttgatatctttattattaaataatatcgttcctttatctaatggaattaatcctaatagcattcgcattgttgttgtttttcctgcaccatttggtccaataaaagcatataaacttccttcaggaacagataagtttaaatcccttacaatggattgattgtcaaaagactttgttaaatttttagtttggattgctaatttcattttgttcctcactttcttattctcaaataaaagtaagtatctattaaattcttgatctattagatattctatttaccctttacctaatgtttgcaatttggatttagaaaatatttctcgttgttttaattttttatcagtaagttcataaactctatctacacgctctaaaatattttcatcatgagtgataataatcttagtggatggtatggcaaatatattttcaataacagcatttgccgtttccctatctaaatggttagttggttcatccaaaataagaatcggatattctttcatgaacaatcgtaacatagccaacctttgtctttggccaccggagaaatttgttcctccctctgagattaaaatatcatttatactttgaaattgaatataattactcagattcaatttatcaatagactcctggatttttgaaggatcataatttatatcaaagtaagataaattctcagataaacttcctctaaataaaactccatcctgagtcattagtcctacattttttcttagttcctcactgttccaatctttaatatctctatcgtctattaatatattacccttatcgggagtatgcaattttaataataagttagctaaagtggacttaccactgccactttctccaacaatagcaatactttcgttatttttaatgttcaaacttaagttttctattatttttttgtcatcaaaactaaacgaaatattattaaattgaatcgatcctctaagaatgtttactttagtatccgatccatctttttctagttcctcttccaagatatctaaagttcttaataaaagtggtttaactgaattccaatttaaaattgatcctataattgttgaaaccggagaaaatataatactagatatagcaataaagaagaaaatattacttaaatccccttctcctttactaaaattataaaatcctacagcaagcattatgataataaatattgttgatagggaactattaaatgattctaaagcattttgttttagcgctcgtttatgtactgtatctaagtatttattataatctttttgccatacagatttaattctagaaaaaatccctgtagcctttacataatacatcgcttttaatgattcattaattttccctctatgttctcctaggtaatacgtttcgactaaattagcattatatatgaatttccctaaggaaatattgataaatagggaactagcaataaaaaacatcaatattaaagtataaaaagtctcagtatataatagatacatcaataatggaatgataactactattgatataatcatttcaattagatcctctaaaatatatcctcgtattgattctaggctcatgattcttacatttaaatcccctgcatgacgtgtagtaattttttctatgggggtattaaacatatgctcaaaaacttttgttgtactttttctatcaatttctttctgaaagtttacttttataatagaagttatagattttatccctataacaacgattaaacttcccaaaataattaaaaggtatcttacatccacttcctttgaagcattcaaaatatccataaactttttcaaaataaaggggaaagcaagaattgagatttgtgctaacaatgctaatagtgctaataaaacaatctggctaggagatacaaaatgatcaatatatctaagtaatatatgtttttcacgccttttagtatttggctgtatatcttttttgttttctattactaggatatagtcacagaacatttcctcaaaacttcttatatcaattatcatcggccctgccttaggatctacaatataaaatttatttgctttaaccctttcaataattacaaagtgattaaagccccaaaatgctatcatcggcttttgtatcctttgtaaatcagttatattttctatcctatatgcagttgcagaaagtccatacgatttactaacttttttaatatccaacaaactccatgccgattttttattgataattttactatttctaatttccgaagcttgtactgctgaaccataataatgcataatcattgctagacaactaggcccacaatcaaaagatgtcatttgcggtataaatttaattttcttccttaacatatttatcacctattctaggcattaaagtataaaatgctatttagtttattatcctctaacctttgtaaaaaatacaaaatacttcctagccctgtaaataatgcgattttatgaggattaaaatcttctatatcaaaattattcaaaaagttatttgttactttcataacaatttgtttttcattgcgctcgagcatacctccattttctagctccaataaaaagtctagtttccccattaaaccatgacataaacaataatcactattttcatgtaatgtacttaagatttgttttttaaaaaaaattaaatctgattgtatatcctcattttgatacgattctaaaattttaattctcgagattcccattccactaaatcctttacaccagctatctgtatactcatattcactcatactcattttctcacttttatgtataccatgtattactctatcgtacttatttgtttttaatatgccttttaacttataaaatgcgagaagttgtcctgataatccatgaacaaacccctttaatgaatcctctaaatttagagtatcgtgagctttccaatatacaaattcattatgtgtttgcatattattgacaatgtagtcaccgagattttcagccactttaagcaatattttataattaggattaatttgatagaacttaactgccgttaaaattagaccagctgaaccccctaatatatcaaaatgcttatcgctatatttacctttttcaatatcagagttgacatccataaatatttgcaatatcaatctttcatcgatagatgttatatgtggtaaatttgttaaatagtaagaaataattgcattaacaccatttacaaaaccataattatttttatttttgtttaatatttcttgcagggctttttgttcaagtttatttataatttcaatctgattaggatcagcattatttctcaataatgaacttattcccaataatccatcatatattccactattcaaatggtttatctcaagctccccttgccaatttgtttttaatccaataaaatctacagcaccgtcttttgatatataactgccatcaagaattttccctgtaattgcttcctttattttatttgtaggtaaattagttcgaaaattaattgtttcctttactgtattcagcttatatagattgtcattttgattagaaagggatatttctataatttttctttgtaataaaaagtcagcatatgaaatttttttaaattttgtttctagatctatttcattatttgataaactttcgcaagactcccattcatacttattaaagaaatatggaacatcataggataatagtgcctctatctctttttgaataatatctttcctagtagccaagtatatgtttttttcaagaatattccgcaaatattttatagtctttaatttattctctaataaatccggaacatttagtctatctaataaaagggtatagacttttgtatttcgatatacttttcgataattccatttagaaacactattttttaatatacacatatactcctctttgttttttaaaactgagttatatgcattctcaaaacctttaataatatcatctatataattatcatactcgtatatatcatcgttaagaaacggtaaattctgaaccgtatcttctactattgtctcttctcttatttcaattggattcgatgtaaattcattttttattttaattgtttttaccaaagacttcattactctcccaattgcactgtaatctcttattacctccctacctccactaaaccttataggtagcattctagaatttaatactgaattagataatataaaactactggtttcttcagtaacacttggatttaatgtacttcctaatgtctcaaaatcaattatgactggtgaggattgtttagctatgatattttcattatgtatgtcacttccattaatcaaatacattaccgaaagcactacacctaaattataataataatctttaatttgctcattagattcacatgattcatgattaatgtattccatatatccataatttcttttattaactacttgcggaataaagatatccgtatttaaatctttattcagttgattaattaaactatgatatagtatagaatttttcaaatcgactggttttaaaattaccttattattaaatttatcttctaaaagaattgttctctttccattattatggtagtcacctaggttaataactttttctacatgcataatattaaaacccgacattttatgaatttctttttgatctttttcaagagcaccttgcaaccaaatcatataatttatttcattttcaatgattgtaaaaattttttcgtttaatacgggtaatattttaaaaaaattcatataaaattttttaaaatgaaagaagttctttgtaaaatacttatattcttcattggtatccattcctcttaaagcattttctaccctaagtttatttatgtatacaattaaggatggccttaatacttggtatagtcttttttctaaatcaaacattatcgattcagaaaccttctcaaaattaccaaaaaaatcaattttatttattatcatatttttaaagaatactacatatgtttgtattattttttgaaagttatagttttcgtcatccttaatgacatcattacatgaaaaaccctctaaaaagataacaaaatttttttctagatattcttttgttactaaagaatgtgatccattatctattgtattcaaaattccatgtgaattatttttcataataacctcttctttttataggtaggagaaacagttagaaattcattctcattaaagagagtaaggcctttcgccttactctctttaactattagtagcattttttacaaattctttgtcccataatcgtgacacatgctacaggcacattccaaggacaatctttagttaaagtttcaacccaaccaggtcctgctccaccaactaattgttcaatctcttcatcttctacgacttgtaaatatttttcagtttccatttcaatacctaccttttatttttttgaaaatgatgttataaattcaataatttaccacaacattatctaaaaacaatataccattaaatgttaataaaaaaaaatatatttatagaaaaataaaataataggatatttaactatattaatataattaaaggagactcacttactatatcattaaaatttaaaggctattttccaagttaatatttttaaaattttataaatttattaataatcaatgctgtttaataatttaaataattcttctaatacctgaataacgattaagaatattaattaaacttgtaaaaaatagattttcagaagatatagctcaagaatattttaccataaaataggataatcaattctttttttaatagtataatgcttcgtcagaaaattttaatcatgaattgcaaaaagcatgttaaaaataaaaagatgaaattgcaagtatattcacttcacaatcccatctcttctaaaaattgtatatcatcaactctcttgatcctcgcaattctaccaaattaatagcaacacattatgtagatataggtttatactattctacatttaaatacatgtaatattgcctatactttgttattttcatgtgaaactaattcactatatatctctttctctatatttttcaagagaatttccaacctattttttgtagctagattaaaatgtggatttaattcttttattataaattcaagtatctcaaagcttatgtaatctcctaattcaagtgaatattgatcacccaagaaagtttttaattttttagagatctccactttatcttttttggtaatatttaccccatccgataacaaacctctcttagattagtcttaaatactaattcaaaaagtttttataacataataaaaatattttggaattaatataaatcatataatgaaatttttacaaataaataaaaaatatacatcataatcattaaacaatatattaagcatcgtaaacatatattggctcgtcataaaggcgtaaacattttgaccaatttccacataacgtttcccattcaccagcaggatatacttccgtacgcaatatatgaagtggtatacgtaaattcaataaccgaccactaagcgtcgtacgagtaactcccgctggcattaaaaactttgcttcaattacctttttcagttccatcaacgagtattctggataactcatcaatatttcatttgaatgaggccagacctcagtatcatttgaatgacggcgtaccgtatactcatgttgatataagctgacaatacgatgccatatctctaaatgattaaataaatcgctatttaaatcccttgcatataaaaaatgtacttgtttatttgcttctgtaatttttgcaagcaaacgtttattagcaataatcttacctgaccaaattattgtaggttctttctttaaattatttacccattcccccattggtaataaatgattccaagcacgaatttttattttttcatcaggtactacctgtacagcaacgcgtttacaacctaatgccatcatagccttcatacgatgggcaccatcaagtaacagataattaccatcactaagctcagatactaagggaggattccgtaaaacaccttcgctttccattacacgacaaatttgttccaatcttttgtgttcatatgattcatgaaagcgaatttgcttgggatgtaagagatctaaggccgaaataatttcactcataaaaacagctcctcaaataattacataaattctaagcttatcaaataactaattttctataatgattagtcgtgtttaccgatatttagcagctattagacaattatttcaaactacgtttaataattttactagtcttctaataaaacacctatttccttttccctagccctttgatagtaataagcagcaatggctacatcaaaaatggccatacccattggattaaataatattgctttgtcataagggaagttttgcagtgctcctcggattacaacgtcagcaattgatactgtatcttctttttgtaaacctctttcaaggtgcatcctttcaacatcagttttttcacgacagacttcttcccaattatcaacaactagggattttgtatattctaagatatcaggcttaaaatcacgaagagaaacattgagtagtagcgctccatctttaggtttcttatcaatataaccttctgcagaaacagtacaagtaataaaaatatcagcatcattataggcttcttcataagcattaaccttttgagttttagaataaatatcctcaggaattaattcgtctttaattccattgatatcatataggtaaacactttcgattttatcgcctaatagggcagttaccatctttaaatgcatctgaccaataggtccaaatccaataattccaactttaacattatttaaatctcttaacttggcaaactctcgaatcattaaccctgttacagaagctgttcgtattacactgaccattgctgtattaagcgtcgcaaatggttttccagtcatagcatcatttaatatagtaactgaatgagcacgctgaatacctttctcaatattcttcggaaaactagctatccatttgattcctgaaaccttaaattctcctccaatataagctggcatagcaataattctattagccggatcatcgaaacgtaagtatggcttaattggctgagaaaaatcatctaaatcaagactttttactgcctttgaaatgacatttattgtttcttcccaattaacacccatttcattgatatgtttggtatttaaatacatcataattgcttcctcatttctatatcatttttataaagaaactaattggtcttctactgatttttgtgtattaagccattctacccattctacgttgtaaatagttgatgtgtaagcttgtccattatcaggacacaagaaaacaacattaggtgtattttgaacatccttattttcaaaatacttttggattgcataatatgaagtccctgatgatccaccagcaaatattgcatgtttattaaatagctcataacaacctgcaacagtatgaacctccggtacaatcattacatcatcaatcaatgcttttttaaccataccaggtatcatactggcaccaattcctggtatgtaccgtttacgaggcttatcaccaaaaataatggacccttgactatctaccgcaataattttaatattagggaatttttcttttaatcgtgtagataccccagcgatagttcctccagtactcactccaatgaaggcataatctaactgtttaaaatcattagatatttccccaccaattccttgataatgggcttcaaagttatcagcattattatattgatttgtccagtatgcattaggaatagtatttaaaagttcttccaccttatttaaacgcgttaataaatagccacctgtttcatctcgttcatccactttagctacttgataggaagttgctctcaaaaaattctcataactatcattaatatttggatcaataactggtatgaatttcaggccgatatacctacaaagagtagcaagagcaaccgcaaagttaccagatgaagattcgataattgtagaattttcagtcacttcaccgcgacttattgctgattttaaaatatggtgagcagcacgcactttaacactattcattaaattgtgatattctagttttgcatacagattaatcttttcatgctctaatttaatcataggtgtgttgccgattaccctttctaaactctctaatttcttgagcataatttgcttcctttcttggttaaaatctaaaaaaataattaaagataatatttgtaaatgttctttcgaatgtatttcaaatagaacttatacctgaaagacaataaatgctagattctttagtatcgataagctaagcaccattcaagtactgccatagcactatttagcttgttttcggcctgggtaaatacaatacttttcggtccatcaataactgttgctgctacttcttcccctcggtgtgctgggaggtcatgcatgaaagtagcttccggatataaagtcaaaattctctctgtcactgcaaatggattaaatgcatctttccataaaggatctattttgcttgtccctgttgtttgccaccttgttgtatatacaacatccacttcactaggtaacatttttatatcatgacattcaataactttagcaccagataatcgtgcatattcttttgatttttcaagcacacttggagacactccataaccagcaggtgtaaaaagatataactccgtacctggaaaacgagataaagaaagagctagagctgcagcactgttattaccttctcccatatataaaacccgtaatccagctatttcaccaaatttttgtttcattgttgttaagtctgttagcgcttgtgttggatgttcttccgtactcattgcattaatgactgccatacgactttgagatgccagcttttccatttccttttgactatctgcagttcttgctactagtgcatccagcattcgcgaaagtacttgagtagtgtcttctatagactcccctgtattttcttgcaaatcatttggaccatacgttacaatttgtgcacccatctttaatgctgcaacagaaaatgccgatcgagttctagtcgatgttttacggaagtaaatcccaattatatttcccgctaatatttgattaggttgcgatttacctgtggcaaactctaccccacgagttacaatttggttaatatcactatcagtaagatcctcaagagtaattaaatgttttcgaatagccattattatattacctcccttttgaataattgcatgtaacaaaaatgtatttacatatgtatgtaaatacaaactactaaacagctaaagtaaaaataatagattggaaatataattcatgtggatccattaccacacttttctataattttttttaaactaatgtatagcagttgatatatagcctatatgaactcgaatactatttttactcagaaatacttacatataattctattgttagtctatattcctattttttatgatatagctctgctgaatatattacacactacaacactaaaaatatactcaaaatacagaattttcagctttctcaattctttcatcaattttctgtcaattcatattcaaattatcttttttactaataatatacatacaatgttggctgtttcttttatagcccacttctaaaaaatccacccattcaaaaataacgttttccggattgtcagttaagatacaaattactgctgcagtcattaaagagtcctctttaaaagagatatactccttctactggctcgctatttttagttatgataacctcttaattgttacagctataacgctaacaattgttattgcaaccattgatctaagtaaacaaacaatgaatgacatactaatatatacacaaagtaatctattaagcgtaaaatgattgcatctccagcaagtttaattacttattcagatctttgcttttataattttcaaaattaaatttccgaaaattttctttccttaaggaaatatcgatcattttaaactatgtaagaatgcttatcttctataaagtaattacacaaatcaacaaagtcaatttcaattattgattctggaaaactatctaaagaagcacaacaagaaagcttataatctttaccaatagtaaactttttataataaacctcattagatagcatgtcaccataaaatattgtattttttttaataacaaaagagtttaaaggtatagttagtcctttccctatccatttaacaaagctttcttttatagtccataattcataaaacacatctaattgttgttctacatttaatgaatttaaataattaaattcttcctcagtaaatatatttttaatcattgtagtatccatgggccggactttttctacatctattcctacttcttcctcatgaatagctccaacaacccaactttcggaatgcgatatattaaaatgaaaattatttaactcatccacataaggctttccgtattcattgtatttatatttaatatctttattttcttttgagaaatttgtagtaattaaatatcttattataatgtctccaattaaggcgctatattggtcgggctttcttttatatttctgtattttcatctgcttttcttttgagaccaaactcataagtttctgcataatgttatgatctatatttcctggcacacgtaccttatatatattcattatttccttcccacctaacttcttatataaatataaaaaactctcaatgaataattcctatttatttttgattagtaaaaaacattttcagaggataatattctattttacattcatattttcgacttattttctaacctctttatgtctattattgaatgggctcaaagaaaaaagtctcataatatgttatacacgaatttatgagacttttagaaaactaatagtgtacaatttcaaataatatttcacctatttgcatgtgctaataagagcatttgtttaaaactcatttttatactctttaccaactcatgaatatgcggtttctctaacatactcagatgggaacctggcacttgcaaagcgtatacttcccctgatgtatattcattccatctgttataatctactagtgggtgaatgtcattaatagatgcattaaatagaaagatatctgcttttattttttgtttacaattatattttaggtatgcatatctattagctatcattacttttaacttattcatcattggatcttcaaaattttgctgacaactattttcattcaatgtaaattttttcagtaaagattctattaattgttcttcactcatttgctcaaaactaattttctcaatccctaactgatcattgaatttttccaattcttcaaaggcattcttaatatttaaactaagaatctccttaccttgttcaataggatgaacatcaagtaaacctagaaaactaactttatcacctagttcttctaattttctagccatttcaaatgcaactattcctccaaaagaccatcctaataaggtatatggcccttctttttttactagtttaatctcttctatatatcttaccgccatttcctctacagataagtttgaaaatctattatcatcatatcctatagattgtaacccatatacagtcttatcctctcctaattctctagccaaatcataatagtttaatataccccctccttgtccatgaacaatgaaccattgactatccttgtttgtcccattttgaattggaattaaacactcactgtctattcctttattcctacttattacatcacttaattgttcaatagtagcattttgaaataataaacttaatggcagttgtacattaaacattctcttgatattttcgaataactttaatcccttaagagaatgaccacctaattcaaagaaattatcatttataccaatattatttacgcctaatatactactccaaatatcaattaaactactatctatgtcatttcttggtggtacataattactattgtccagtgtatttagcttcggtaacttacttctatctattttcccattttgtgttaatggtatattgtgaattggtatgagttgttgaggtatcatataatatggtaactttgttgccaaatatgctcttacctctggaataggaatatctttttctgtaactacgtatgcacataaatacttttccccagcttcatcttcttgatctattactacggccgttttgattgtctcatattttaacaaactcgcttctatctcacctagttctattcgatatccccttatttttacttgatgatcgactcgacccaagtattcaatgttaccatcaggtagccaccttgctatatcccctgttttatatagtttctcacctcgttcaaatggatgatcaataaatttatctgctgttaattcttttcgattgatgtatcctctagctaaccctatgccagagatacatatttcacctggaacacctataggttgtatcctataaaatgaatccaatatataaattttagtatttaacaatggtgaacctatcggtacgttttgtgttgtaatttctttattactctcatatcgataagatgtacaacaaactgtagcctctgtaggtccgtatccatttaatatttggaggttccccctaaatagatgatcgtattttgcgagtaattctgttttaatgggttctactcccacaagtagcttatttaacactatcttctggttatctctaacaaaataatcatatatttcatttaataaagtaggtggaatatatgataatgtaacctgttcttcaagaataacttgtacaagttttgatacatcaaacttctcaccttgataaatagtcattcttgcgccatatatcaatgggacaaatatctcaaaaatagtaacatcaaaagaaatactacttgagaatagaacgttatcagttatccctatatcttgagagaaatcttcatacattgcacacaaaaaattagtcaaggatcgatgttcaatcattactcctttaggttgtcctgtagaacctgatgtataaataacatacgctaagttgtgaggttctatcatcatttgcatgtcttctcctggttcttcttcaaaagacatatccattagatctattacattaccttggaattctattccctttatttgatgtactaatacatgtgaacacccactgtctgtcagcatatattccactctttgttttggtaagtcggtatcaattggtaaatacgccccacctgcttttaagacacctaatatacctataaccatctcgatggatcgttccattatcacaccaacaatggattctcttttaactccttggtctaataaccttctcgccaactgattagcttttatatttaattcattatatgtaattcctttttcattacatacaacggctatttgattagggttccgttttacttgttcttcaaacattttatgcactaataaatgattagaatttgaattctcttttttgttaaattcattcataatacaatgttcttcttctatagataacatattaatattacgcaatcgtactctagggttattagttacttcctcaactatatttgtaaaatgtaccattaacctttctattgtctccgctttaaataacttagtactatattctacttttaaatgaatgttattatctatttccgttgctactaatgacaaatcaaattttgaaactgactgcttaaacggatacggtgtaaattctaattcaccaatagatattggattcatatccatgttttgaaaaacaaacatggtatcaaataatggatttctacttgtatccctatgcaagtctaaaccttctaatagttcttcaaaaggatagtcttgattttcataagcttctaatgtattgagttttaatctactcaaaaactcaataaactcatcgtcattttctagataatttctcattaccaaagtattaataaacataccaatcatatgattagtatcagaatgagaccttccagcaataggcgaacctacaataatgtcttcttgacctgtgtatctagataaaagtatgttataaatggccaataaaatcatatatggcgtagtaccagtttcagttgctagcttatttactttaaaagttaaatctcttcccaaattaaaagaacaaacattacctttaaagctttgtatagtcggtctttgaaaatcggttggaaaatttaaaaccgggagttctccttttaaagttgttaaccaataattcttttgttcactaattagattcttatagtaaggtccattttgccacatcacatagtctttgtactgcactctcaattttggaagctcatttcctttatacaattctacaaactcttttattaatatccccattgataaaccatcagatattatatgatgcatatctactacaaggatatgtctttcttctgctatccttaaaagcaacacccttaataatggaggttttgataaatcaaatggacttataaactcatgtattaaataatccgcatctttttcatttacatgaacgtattcaatattgaaatctacattaggctcaattttctgcactaattccccatctaaaatttgaaaagaagttcttaatatttcatgtctctcaattaaagattgaaatatattttcaaacttatctttacaaatatccccttctactttaagtattgtgggcatattataagttgtatttgtaccatcttcgaattgatctactataaacattctcttttgtgacgtagaagctaaataatactcttgttgttttacaggttctatggaaatataattacttttttccatttctaatatacattttgaaaaatcaaccaaaataggaaacttaaatagggatttaatagataattgcacattaaattctttattaacgatagaaattagcctagcagcctttaatgaatgaccacctatctcaaaaaaattatcccgtattcctaccctttgtattcctaatacatctttccaaatctcaactaattttctttctgtagaatttgtcggctctagatgactagatttcaaattatttataggttgaggtaatttttttctatctatttttccgttttgtgttaacggtatgttttgaatggatatgatttgttgaggtatcatataatatggtaacttggttgctaaatatgctcttacctctggaataggaatatctttttcggtaactacatacgcacataaatacttttctccactttcatcttctcgctgtattactacggcggttttgattgtctcatattttaacaaacttgcttctatctcacctagttctattcgatatccccttattttcacttgatgatcaactcgtcccaagtattcaatgttaccatcaggtagccatctcgctatatctcctgttttatataatttctcaccatgttcaaatggatgatcaataaatttatctgctgttaattcttttcgattgatgtatcctctagctaaccctatgccagaaatacatatttctcctggaacacctataggttgtagcctgtgaaatgaatccaatatataaattttagtatttaacaatggcgaacctattggtacgttttgtgttgtaatttctttatccctctcatattgataagatgtacaacaaactgtagcctctgtaggtccgtataaatttaatatttggaggttccccctaaatagatgatcgtattttgcgagtaattctgttttaattggttctactcccacgaaaagtttatttaacgatatcttctgattcgcccttacaaaataatcatatatttcatttaataaggtaggtggaatatatgctaacgtgacctgttcctcaagaatgacttgtacaagttttggtacatcaaacttctcaccttgataaatagtcattcttgctccatataccaatgggacaaatatttcaaatatagtaacatcaaaagaaatactacttgagaatagtacattatcagttatccctatatcttgagagaagtcctcatacattgcacacaaaaaattagttaaggaacgatgttcaatcattacccctttgggctggcctgtagaacctgatgtataaataacatatgccaaattttgaggttccatcgttatctgcaaatcttctaattgttcttcttcaaaagaaatatccattagatttattacactaccttgaaatgctactccctttataatagagttttgatatgttagtagatgtgaacacccgctgtctgtcagcatatattccactctttgttttggtaaatcggtatcaatcggtaaatacgccccacccgcttttaagatacctaatatgcctacaatcatctcaatagagcgttccatcatcacaccaacaatggattctcttttcactccctgatctaataaccttctcgccaactgattagcttttatatttaattgcttatatgtaatttcttttccattacatacaatcgctatttgattaggattctgttttacctgctcttcaaataattgaggagctgttacagtctcacaaagtaatgttttatgaactttagtcgtatgattgaaatcaaataatatttgattcttttctgttttaggcattacatctagatccattgcagatttatttggatctttcattaatatatctaaaatattatataaatgattaactattctactaactaatccttcactatataaagtagaattgtaatccacttgaacctttaactgttcttcatttttcataaacctaataaccatatcagagtttattttatctgtactctcataacaatgaatatcatctaacattactattgtatttaatacgggaagattattactctctccatctagacttaataattgagtaagtttattaaaaggaaaatgacaatgttcatttgactctaaaattgtttctttaattttatatattatttctttgaaattatcttcttgatttatttgagtacgtaataataaaaagttgttttgaaaaaccgtctcttcttgaccttgcttaaaaactggcattccaattactacatcatccctattggtatatctacttaagagatatttcacgcctgataataaaatagtgtacagtaacatatcagaattattgctaattgctacagctctcttcgcaatatccgatgggaattgacaataataactttctttagaagcctgaatattatttaaagacagacaatcacaaggaaatctacttaactcaacatcacctgataacttgtctaaccaatattctttttcttttttaaatttttcactagataataaaacctgctgggtaaatttatcaagcattttttcttcccaccattctctatgatattgatactaaatactacatatttagtggttatgttccccatagacctatccgttttatcatgagggggcacaatcatactcgtcattgggagttttcttcctcagtaataaaactcccaatgacgaccaattagattgctactttaacgatagaagtttcacataaagcatagaaatgcacttttctcttactcagatacatctcttaatttttttacttcacagattttaccctatctagtattttcataattaactcgcccacgatgtcagcttgatgtagtaaaaacatatgaccaccattaactattagaaaatgaacctcattgccccattctacccacttcttagccccttttactgtataattagagtctgttgttccactaataatatataggggcgctttcaacaatgttgtgtcatcatttatataattctcaatggcacgaaagtctgatcgaataactggaaggatatagtttaaaagctcctgatgttgtaatacttcatccggtaatcctcccaaagactttatataatctataaagtctttatcatctaaatgatttgtttttcttcttatttccggtggattcatagcagagataataacatttttaggatttatgcccttactttctaaaatttgagccatacggtgaactataattcctcccatgctatggccaaataatgtaacctctccctctaaaattggttgcatctccattaaatataaattaacaagatcatctatgttatcaactagtggagaaagattaggaccatggcctggaggatcaaatgaaataagttttatatctttcggtaaataattctttaaaggtaaaaaagaattcgaatagcccccagcataaggaacacaaaccaaatattttttactattcaatcctggcgataaatctttcattaattttctcaagtgacttctcctttattaaataaaattttcatcaaatagttgtttaatcaaacaaattatcaatttcttcatcactaaggtttaaggtttcaaaatctgatgaagtaaattcttttgtttgcatttgacaacaggattggatatatgtctgtagtcgttctagataatctgaaaataaattttctaaaaaattcttttgaaaatgacttgtactaaatgtcacatgaatttctaagcttttattcttaaccatagccacaatatccaataatgcagtaatatgattatcttttgattgttcactgccactttgataatcaacaatagtaaaccatccatccccgagagaattatctatctctcctaaatagttaaaacgaattatattttgagttaaatctttgcaagaaggaaacttctctttaagaattccatatccaattcccttattaggtcttttacgaacctcttctttaacactctttatttgattagcaatattatgcgaaacttgtaatacaataggatacatcgttgtaaaccaccctactgtacgtgaaatatcaagatgctcaaataattcctctcgaccatgaccttctaactcaaatttaatttgatcttggtttgtatattcacctaaattttctgtcaacacagcaagtaacaactccattggttgtgtattgtaaggcacatttgcagtagttaatagttttcttgtatcatctgcattcaatgtaaaggtaagagtcgtacaactttcaacagtactattttctttttctctattaatttgaaaattattatctagcgtgttatctatggattcccaataatctaattcagcatgtactaaattaactcctcgactatttaaagcttcagaccaatcttggaaagagttagtttttaatggtagcgatggaacttctcctaaatacaagctattcaaacatcggtttgcatcttcaattaaaatacgccaggacacagcatcaacaataaggtggtgtgcagttaataataacaactgttgatcatttgaaagctggaataaggcccctttaaataatggtcctacattcaaatttaaacttccttttaactcttcaccttttatatgaacctgattcaaagccatttcaattggaatttcagacaaatcaaacatggtaaccttagaatcaacaatggacatatcttcgtcataatagaagtaatcctgcttatcctcgtaccttaaccgtaacaaatcatgatgatgcatgatcgtatttaacatcttattaacatattcttctttaaccggcttcttcaaagacagtaataccgattgattccaatgatgcgggttcttaaactgttgatcaaggaaccaacgcataataggcgtaggctctacctttcctgttaccaatgtttgtgagactgtaacatctttttgtttaactaacattgctgccaattcacttacaactggataatttagtacatctttaactctaactttccatcccagttcttgtaatctagcgctcacttggatcgctttaatagaatctccacctaaatgataaaaattactatgcaattcgattctatcagtctgtaatatttccttgagaacttcactaaccattccagtaacatcttcatctacttcttctaaatgagtatgattagaaccgttatttaacatcggatctggcaacgcttgacgatctacctttccattgatagtaagcggtagctgatccatatagataaaaaatgaaggaatcatataacttggtagcatatgcgaaataaaactgcgtatttctatattttgaacactgtctttcaaaacaatgtaagcaactagatgatttgaattatcctcaccttgccaattcaccactactacatctttaacagacttgtgttgtaacagtgcattctcaacttcccctatttcaatacgatatcctttaactttcacttgagaatccatccgtccttgatactcaattaatccatttggcaacatgacagctaagtcaccacttcgatacatcttctcactcgaaataaatggattggataaaaaacgttgcgctgttaaatccggacgatttaagtaacctttagctaccccatcacccgatatataaatttctccttttacaccaataggaaccggctgaagattcttatccaataaatatatttgaacattatcagctggtgtaccaattggtacggatgctcttcgatctagatctggatcataacgatgaatcatacatccaaccacagtttcagttggtccatattcattaattatttcaactttaccgctaaaaagatcatatatcttttcggctactgaggttttcaaatcctctccacccacaatcaatctgcgaagagatgaaactcttgggggtgaatagttatttaacaatgctaaatgtgaaggagtaactttcaacactgttactacattttccttgagtatttttgacaaaataaactcatcttcattatcatgatatattactaacaataaaccacttattaaaggagtgaatattgaagttactgttaaatcaaaagaaacggatgaatataatgcaaaaacatcattttcactactaatatagttctttttagcccaggaaatatagttaaccaatccacattgagtgattacagttcctttaggattccccgtggttccagaggtataaattatatatattggatcatttggtgcatttactaggtttagattggcattatctccttcataaagtttctgatcacatatattaattttctcacctaaatattctaaattaccctcatttgtatagtcagttaaaagtaatgttgtgccgctatcattcaaaatataacgaattcggtcctctgggtaggaaggatctataggcaaatatgtacctccagccttaataactccccaaattgcaattactatctcaagtgaatgtttagctagtatacccacgacttgaccatttttgactcctttttctcgtaactttcttgctaactgattagatttcttatttaattcaagataagtcattgatctatcagcatgttgaattgctattttttctggtgtctgttttacttgttcttcaaataattcttgaatagttttttctttcggatacacaacagctgtattgttaaatttctctaacataaacttttgctcatcatccgataacaaagataattcttttatcgattgatcttcattacgtaaaacttgttctattaaagctaaaaacctttcatgcatacaattgatttgatcttcttcaaaatccgcgactttataatcatattgaatttctaaaccttcatctgcccattccttaataactaactgcaatgaataggcttggtaaccactgtaaaactccacgttttctaaagaaaatccatcaatagtatttttaagttttgtattatagtaattcacactatattgaaataaaccatcgtatcctttactagtcaattgcaagtcttttaccaataagttataaggataacgctggtgaaatagacattgttttatttcatgatttactcttttaatgaaagatagaacactctcatcttcatccacatttaaccgtaacggcattgtgctagtaaacatacctactattttcttttctagtacaccggaacgatttagtacaggagatccaatgattatgtctgattgatcatacattttatgaatataaataagcataaaggttgaaaataatgtattcatagatattctatgtttttgtataaaagactgtagagcaaccgatttttctttttcaattaaaaatatctttcgtttcccttctagagaatgagatgtttttgataaaaagaaatctggcagattcataaatttctcattccaataattcttattttttacgtatcgaggggattccagatatttctcctctgcttgtaaataagacagataagtagattcaaccgtatcatttatatgctcatcattctttaacttagagtaaaaatcgataatttgactcgtcataagttggattgtccaaccatcagctataatatgatgaaacttaacaaaataggagctttctacatcacttattttcaagagcacaaattcaaacagagggcctccttcaagtggaatttgtttttgaaattcatcctgggcccattttctagcttctaaacttggattatgatgattagaaaaatcaattaaacgtattggtgtaggttcaaatggtgatatatattggtggggttctctatgttgttgaaaaatccgtagacgtaaaccatcatttttcttaatgaataattgaattgctttttctaaaattgtaaaattaatttccccattaataagaaccatccctccgatgttatacatagatgtgtttggataaatttgttcattataccaaactcttttttgtggatgcgtaagagaatgctttacaattgtttgttgcatatttccacttcccctctatccacatccgttggtatttccggaaattgtatattaatatagtgaggataaggatttatattctcaagattatgttctaaaattaatattccattttcgttgctagtttccttaaatccagctaatcggtacgtaacaaacatcatacggttacggtcagtctgtcgaaactcagccaaaaagcgtttacctgcctgttttgtcctttccattagatatgtgaggagtatagtaccaacgccacgggacattacacgacaagacatgagaagaagttttaggcagtcggcttcctccgtcctttttacaagtgttaaaccaatcttcccataggagccatatttgtctgataactcacaaactaataataaataatctggatgattacgataatagtttaattcatcataatcataggtaataccagtcgaatttaattgattcgtacgtactgttaactcctctgcacgctgcaaatcttcctcacgagcctcactaatcacaaaattcatcccaagtgaagctaaaaattcttcttttgggccttcatattcttcttcatccttcgttctcttaagattttctaaatacatcagtcttcgacgacctgaatcttctgtaattctttttggttgtagtcgtggcaagtctaataacgacttatattcattcacatgtatacacagaatatcattatgaacactctgtacttcttctaattcaaaaggttggtcatcaatgaacgcaaaagtatcaatacctatgtttaaattttttctaattttctcaatggaactagatttagagttccaatgaatctccggatataaaaaatactcttctattccaaattcccgtaatttagctattgcatcttcgtagttatttttactagcaactgattgcagtattccacgtcgatctaattcacatataatttcataaattccaggttttaaagtaactgtaccactctctaataaaacaccatcccaaattgtacaatctaagtcccaaacaacacatttaatttccttactcatgataatgcctcctttgttttattcattttcacagttcccatctccatcactataagcttatctgccaaatgaaaatattgatcgtcgtgagtaatagcaataatacatttaccctttgctcgcatttgaggtaacaattcttcataaaagaagcgtctataaccaggatcttgatccgctgcccattcatcaaataaaagtataggtcgatcttccaaatacgtaaccagcaatgccaaccttttcttttgtccagttgatagttgcgtagtagtaaagcgcccattctcaatgccaaccttgtcactcagttggagaagttctaaataatgatcgatttctgctttcattccttctgtattaattccatatagcctatcaaaaacatgaaaatcactcaggatagctgaatagtattgattcaattcctctggagctatttcttttccatttaataaaatgttaccttcattaggttcatataacccagtaatcagttttgataaagtagattttccactcccattaccaccagcaataaagactatttctccagaattaaactccatgtctattggaccaataccaaaaccagtaaaatctccatctttattcttatacttataacttacattttgtagctgcaaacaaattggcacatctaagtactcttttgttgtcgcgatttgctcatttgcctttatatgatctacactcttcaccatttgttgaatacgttgccaagaaatacgtacatttacgagctgagggataccgcccagtatttcattaactggacctgtcatatacagaaaaacgattacatagttacttatcgtctctttcggcatattaacaaaaatttctggaaatacgaaaactacaataccaataacaaaaatgaataatagttctcccagaacaaacacatttgcaaatttaatatctcctatcgttcgtttaacacgatagttattacagctttcattcataacttctcgaaaatcgtttcgttttccagtatgaagcctaagctctttgaaaccatgccttagatcaccaatcaaacgaaaatatacattctgaatatctcttgtttcattccaaactttatctgcttgtcgtccgatcaaagaatatacccctgcagtaataaagatgatacacaaggatagtaaaaaggcatacatattcattacaccaagatagagaaaacaaaatagtaacgttaataaacttgttccagcagtaactaatagattgagagaacgagagataacttccgtatcgttatttaatgtcgcctctattcggcccttctcaatcaactccaatttgtaataaggagtctgtaacaacttatctgttaattccatccttttttcataaactagctcgtttgtatacgatacaatgctagttctaataatacgttgtgaaaagacatacataacgattccaagtacaaagtaaaacaacaagccattttccaaattatttgatctaacaaacgtttcattaatcacaaaaatgagaaaggcattaccaaatcctgatattaatcccaaaacaattaaagtcaaaagcgactttcccttttgtcttggaaaacaaagatttaagaatgtatggataacataggccaaacccaccccagcaattgcatatattgcaagtacaacagttgaaggagcccaaacttttataaatgcccacggaagccctccaaacaagagatttggtagttgataaagtgcataaatcattagcccatatatcgcaacaactaataccatatgtaaccatgtttttcccgttggtaatataaactttctttttctaaaaataatctccctgattaaatgaaataacatgaccaataacgttagtaaacacaaagatgagatcacaaataaggctgttcctatttgatccgttttcttatattcatcatagagtaacggtttaacttctttatctatcatcatatttaaaagactgctaccgatatagtaagtgtaattactattcagattcgctaatactacgacccctatctgttcctcatcacggaaaccaatatacgatgaataatttgggttacttccaccatgtgaaatttcccctccaccactttgatagacctcccatccagctgcatatgaagctccattgctatctggggcaacctttctattcgctttatgagaatcgttaatcaattcctccggaaacatcctaggcttttcaaccccaagctgtaattttaaccatctttccatatcatttatatttgaaataaaatatccagccggtgtattccccctataattaggagcgtcatagggtaatgattgtaagaaattacgcttgtaaccttgggccatgttatctaatggggccatctcacgtccagcgtatgtactcaataaatccaactttgatagcacatgatcttgaacatatctttcaaatgattgattagttgccttctcgattactaatcctaatagatcgtagttaaccgtagaatattcaaaactgctacccggctctcggtttagtcctattggcataacattcctaatcgttttctcaatagaatctttgccattggttataggaatatatccaatggccttttccggtattccactagtatggtgtaataagtcataaagtgtaatttcataaggtttgcctttatactccatttcaaaccatgaaacatatttagttaaagaatcactaagtttaattttcccttctttttctagctgcaatacagctaatgccgtaaaagcttttgaagtagaacctagctcgaaaagcgtctcattcgtaacttgacgtttattgtctatatcggcataaccataattcttcttataaatcgtttcgtttccttttacaattactactgaaagtccaggaatacccgcttgagatatttgttcttctatatgcttctgtattttcttctcattaaactgtaccgtttcctgcgcttccacctgtcgataagggagtactattaaagtcattaaaatgataaacttcaaccatatgtttaacttcatatttttagccctcttttagttaacttggattaacttttcaattttctttttaaatggttgcacaacattttgaccaatacgttcaatttcatgctcactaatctgagaagtaataagaaaataatttgcccctatttcccaaaaatcagttaatgtcgagatgacttcctcatagctaccaactatagaaattgaattagatgggttaactaaacttagacctccccaaagatgatcatctatccacatactatcttttgtaattaaatctttgtatcggcgaagtccaacagaatctgcattatctaaaaatagcttagtcatcctctttaaggctgctggtgttctctcaagtaattcatatgcttctttatatgcttcttccgaagtctcacgagcaatgatgtctactaaaatagcacctggaattttctcgcgcccatattgcttagcgtaattattaactgtttgatagtgttctctaagacttttgcggtctgttgcataaagtatataagcatcaccatactctgcagctactctcattgcctcctcggaggaccccgctacaaagtagcgggcacttcgagagagatcttcctttggataaatatcactattttctacttgataaaactcacctttatagctagttactcctcgtcttaattgttgtaacagctcaatatattcttttgtcctagcatatcgaacatggtgcggttctggtaatccatcacgcgcaaggacaagcgaggcacttccagttacaatgttaatatctgcacgattaccaattaaactatttaaagtattcaatgcttttgctgttacggtaggaagcatctggtttgtattttgcgcaaccaaaatctttacaaactccgtattcattccaatcatagacgctgctatcattggatcaacagatgttggtgcaatggaaaccaataccgagtcaaagttattcttctcagctcttttagcttgattaacatattcctctagaagttcttttgtttgtggtgttggaataacaggtaatccccagcaaaactcaacttttgacggaactacttctttattaatcatgttgttcccctccctttactactttctactttttaaagcagataatgtatttttcataaccgatttcgctttcaataactcttttttatttgttaaattgttatttacttcttgattacttaaatatttagcaagagatttaattgacgtatgctcataaagaacaactataggtaagtctcgtttaaaggcctcttttaatttcacattaatacgaacaagatctaaagaactcattcctagatcgaagaaattatcgtaaattcctatttcttcgattccaaacatatcttttaataattcgtataattgttgttcaatttcattagttggtggtctatacgttgtggaaacatctgaacgattctgctttaatctattcttacttcctttttccaatagttcattataatagttggcaccatttaaaagtttccaatgtaaatctattggagaaaccacgacttgttgttgatttctattgatgatactacggaatacttttaaaccctcttctacagttacaccatcatgtaatacactttccatatccatattaaattgctttgcccatattttagccgacttaagtgacatacccacctcttgccaatctggccaattaatagctacagtgaacactccatcatgagcccgcttataaaacgcaaatgcatctaaaaattcattcgctgcattataaccactctgaccaaatttcatatgatacgccacattaccaattgatgaacataatacgaagaaatcaattggttcatcttttaataaagcatcgagtactagtgtacctttaattttcggagctaaaattttattattagattctttttcacgattcatcataatacctagataatcagcgacacctgctgcatgaattacgccattaatagaaccaaaacgagatttagccttttcaattgcctgtttcatatcatcttgattggaaacatcagaacttaggatcatgtattctgcaccttgagactccattgtcaacaaatcagaaataactcggcttacacgctcgtctttattttctaagtactgttcccattgattacgtggtgggaactctgagcggccaatcaatataagtttgacatttggtactctattagctaaatcttttgcaatttcaaatccaattccaccaagtccaccagtaattaaataaacgccaccctctcgtaatctatcaatttctacatcttcttcctcaaaaggactttgaataatcgtttgcgcccatcgatgacgtcctcgataagctacaactatatcagtagaatccacaaaactctccattaaacccgcttcttcaaacatttgttgagaatctgtatccatatcaatggtacgacattttatattttgaaactcaagattgcatatttttgaaaagcctagaattgtagcttgctctggctttaagttcagctctgtacctgtaacttcaaacatacggtcagtaaaaatgtttaactgtaatgcgccctcataattaattttcccaattgcttgtgcaatataaagtaacgaataatatccttcatccattgatcgttcaattctctcttgatcgagaataacatcattaactggattaaagctccaagcatgtataatcttatttggtaataaatctttttgttctaattctgaaaatagcatttcataatgcattttttgagatggacatatcgtatataaaccgtcggatttttcagagaaaataccacctgttttaacttcaattacatcatgaccttctctttttaatttttctatcagtcgattgaatcgatttagatgatcattgaaaataagccatttatatttttgttctttctttatttgtatagattttaatgttttgcgttcccaagaaggcaaataaaaccagtctttaatattagcctgtttattatggcctcttgtttcctgagttaaactctgagattgagtattaaaaaatggatcagctttaaatcgttttttcatgaaaggatacgttggtaaatctaataaccttttattctcactgttattaaaagtattccaatttatagttccaccttgcatccataaccgtcccatttgcttgcataaatgctcgaagtcatttgatttatccagaggatgacgtaacatgtttaaagccaattgatctttacttctatttaaatgttttaatacaaaagttgataatgcattacctgggccaatctcaaggcaaattacattttttaaatgaaaaatttcagataatccctttgaaaattgaacagtacttcgtagatgctgtgcccaataagaaggtgatgtggcttcatttgctgtaatcatttcacctgtaacattagatatataaggtattttaggacttgataattttatatttcctacagcttgctcaaatgcatctagaacttcatccatcattcgagaatggaaagcatgcgaagtaaatagacgcgttgtctttactccatgatttaaaagtaattcctcaatcttattgattgaaagtacagtaccagaaattactgaatgttgagaggaatttacagctgctatatctacatcatctgttatataggtttgtaattcatcaacagataaatttacacttagcatagcgccttctgatacgctattcattaacttccctctaatcattactaaatgtaatgcatcttcataagacattacttctgctaaacaagctgctacaaactcaccaatactatggccaaacatgacccttggataaactccccaattcattagaagcttggctaatgcatattcaatagtgaatagtagaggttgcgtcattgaagttctatttaactgttcagttgctttatcctctgtctcctttgtaggatacaaaatatttttcatgtctatatctaaccaatttgagagtaaggctaaaccttgatcaacgtgttcacgaaatacaggttcattttcatataaatctctacccatattgatatactgtgatccttgccctgaaaaaagaaaggctaaaggtctactctccattgcgtttgttttctctagtcccgtatcaccaagtttttctatggcatcctctattccattaacaactacagcagttctgtatggaaattcacgacgacctttttgtaatgtataagctgtatcagatagtgatatctctcgattccccttcaaatgcaataatagatcgttagtagctttatctaaggattcctctgtttttgctgaaacagttaataagttccaagattgtttttcaaaattcttagcattgtcaggaacagactctaacactatatgtgcattagttccacccatcccaaacgaactaacacccgctcttcttacctctcctttccatgggataagttccgtatttacacgaaacggattttttccaaaatcaatgctagggtttgggttattataatgaaggctcggcggaattttcttgtttttcaaagctaagaccgtctttataaatcctccaactcctgctgcagcatctaaatgtccaatgttcgtcttcactgatccaattaaaattctacctggttcttgcttaccaaaagctaacttcaatgcttctacttctataggatcacctagttgcgtaccagtaccatgagtttctatatatgagatttcttcaggcttaacgccagctatttcatgagccgattttataacagcagcttgtccatcaacccctggcgctgtaaatccagccttattggacccatcattgtttactgcagcccccttaataactccatgtattaaattcccatctcgaagagcgtcctccaaccttttcagtactacaataccagcaccatttccacccactgttccttgagcatccttatcaaaagctcgacaatgaccatctggtgagaaaatcataccatcttcatataaatatcctgtttttgttggataagttatacttactcccccggccagagctatatcgcatcgtccatcaataagatctgcccatgcgttttgaatagcaactaaggaggtagaacaagctgtttgtactgtaaccgctggtccttttagatttaatttataagccaatcgagtagcaaagaaatctttttcgtttaacaacattgcttggaaatcttctaatgtattagaagattcactggcaatagaacgaagccagtggaaatttggtgatcctccaacataaactcctgtattcatatgagaagaattaacctcacctgcttgttctagtgcttcccatgcgcattcatgaagtattcgcagttgtggatccatcatttcagcttcttttagactgtaatcaaaaaattcattatcgaatgcatctacatcttctaaataccctttagattttatataattaggtttttgaatcacttcttttggtatgcccatctcactaagttcttcatctgtaaatgtacgaatggattctatcccttgttctaaatttgaccagaattgcttaagattagaagcgcctggcatacgaaccgccataccaaccactgctacatcatttttattcatagataaaaaattttctttcttaacttcttcaggttggtgttccatagcattatcacttctaaagtaggaagcttgatcatgaaccgttgggtatcggaataacataggcattgtaagttctttttcaaacttgcttcgtaaacgagagaacaatcgaaccatttttaaggagttccctccaacatcaaagaaattatcatacaaccctactttttctacccccaaaacttccttccaaacatcagctaccgttgtttcaagctcatctagtaaatcatttggttgtactaacttagtaggcttaggtaaagcacgacgattaacttttccattcgtagttaatggcatttcacttaaaagtacaaaatacataggtatcatatacgaaggtattttgtcagtaagataataacgtaattcattttgagatatatcttgatcagttagtatataagcacacagttcttgttcctctccaaaagcaatagataaaactaccgcttccttcacatccgcatgctgttgtaaatgatgttctatttctcctgtttcaattcgataaccacgtatcttcacttgatgatcactacgacctatatactccatttcgccattttcaagaatacggactaaatctcctgatctatataatctttcacttggattataaggattctgtataaaacgttcactgtttagttcaggacgatttagatatccccgcgcaactccatatcctccaacataaagttccccttgcattcccttaggtgtaggattcatatgtttgtcaaatacatagcacgaatacgtaggaagaggcacgcctatagcactaagattactgtgcatttctttttctccaatttccttataagtaacatgtactgtcgtctcagttattccatacatatttactatgaccgtattaggtgaacgcttaaaccaactttgcagtaaacctggcttcagcatttctcctccaaatgtaagtaacctaattctgaaagaaagtttaggcatttcttcaactacttgctgaaaaacatagaatgcagatggtgtttgattaaatatcgttactccctcatctgcaaccaactgagcaagtttatacgtatcacggattgttttttttgttgccaggacaagacgtccaccataagtaagggatccaaatatctcccaaactgacatatcaaaacagaaagaatgaaacagtaaccacacatcattactagaaaatttaaaactatttggttgatgcataacaagttgtattacatttcgatgttcaatcataacccctttaggacgtcctgttgttccagaagtataaatgacatatgctaaattggttggggcaacatctactctctcgaaatcttgcataggtgtctcattgagttcttcaataaaaagcattgtgctatcaaatttaactttatcctcaaataaatttgaggttattattacatttgaaccactatcttgaagaataaaatcaattcgttcctgaggataatcaggatcaattggaacataggccccacctgcttttaaaataccaagtagagagataatcatattaaatgagtaatccaacattacagctactggagaatctaaagttacaccttcttttagaagagcaaatgccactttatccgcacgctcattcaactctccataagtcatctcactattctcaaatgtaagtgccactctctcaggatgcttttcagcttgcatctcaattaattgatgaagtgttgtgtgtgggaatgtagcactttgattttgaccaccttgaagcaaaaacttttcttctgcctcatctaacattttaagagtttgtattggttgtccttcatctaaaagcattgaatctaatagctgtataaaatggttagttatactggtaataatggattcatcaaatacatcttcaggccacatcattgcaagtttaatagaatcgaaacactctattgagacagttaaatcatagttggtcatttcatttacttcataacctgaaattcttacaccttcatcaatttctttcagcttttctatatcaagagggtaattctcaactaccataatagtgtcaaatgacacgtttaaatcaacaattggagtcgtttcatattcagttcttctttggacatcactttgaattatttgtaaaagatctgaaacagtcattctcccatcagcacttacacgaagtggtggtgtatttataaataaacctaccatttcactcagaccatgcattggaattgaacgaccagatactgttgtaccgaatattacgtcctctgaatttttgtatctttgtaataatagaccccaggctgtataaaataatgtagccaatgttacaccttgattacttgcaaaacttcggaatctatcacttcgctctttatctatctcttttacatatgtttttgctttttttagttcattagaattcttattggataaatttatttgttcagttaattcatttaaatattgttcccaaaaaagcttttgttttgatttatcttgtttttgttgccatagtatatattctttaaatttctttttatttatagatgatggtacctctccctttattaactctcgatatacctcaataaactcttgtaaaataataccattactccaaccatcaaacaaaatatgatgatgacgtaaaaccatttcatattcgccttcgttcaaatggcacagttcgatagaaaagggaactgtttgtaaatcaaagctttctgtattattagagactttaccatcactatacataatcttcggagtatgcttttttagtataagttgtacaggttgtttaactttttcccatcgaaaaattgtacgtagcatttcattttcccgcgtcacataattccacgcctcttcaaactttggaatattaatttttccagttaagcaaagtcgaagttcttcatgatatagctttccttcgggttctttcaaataatgataaagaattccttcctgcactggtgtaagggcgattacatcttcaatatcttctttatgaatctttactgctttcctcattaacagaacctcctacaagtgtggtatggtgtgaatatttatcggaacctaataaggcaagtgcttttctatctatctttccgctatccgttaatggcatttcatttacacgtacaaaacggttaggtatcatataatctggtaaaaataagcgaagatatttttttaacctctctaactcaatatcattttctgactcatagaaagctattaacttaactaccatctctgattcttgtcttacaattaccgcacattgtaaaactccttcacaagacattaaacacgattctatttcccctaactcaatacgaagcccattaactttaacttgaaaatcaattcttccatgaaactcaatattcccatccgatcttattaaagctaagtcaccagttttatatatacgggtatcaagggaatattgtacaaacttttctgccgttaattgcggcctatttacatatccacgtgctaatcctatacctgagatacataattctcctatatggccttcaggaagtttattaccatatttatcaacaacaaacatctcaatattcttaattggtcgccctattggaacgctcccttctgtaatctcatgtgtcggacaatcataagcagtcacatcaatggttgcttcagtaggtccgtacagattagtaagaagtgtaccattagagaaatttagcaacttattaaaacggtttacatgttgagacagtagtgcctcaccactaacaaatacttgtttcaacgattttattcggttagtttcacctgtcacatcaagatagtgtaaaaatgcacttaacatagatggtacaaaatgcataattgtcacgtcattactttcagttgtctcaataatagcctgtggaaacttctccatccccggcgcaagaatacatactttggctccaactatggcccaccagaacatctcccatacggatacatcaaatgtataaggggtcttttgtaatatagtatcctttgaactaattggataagcctcttgcatccactcaattcgatttattaaggccgaatgctcaatcataacacccttaggtttcccggttgaaccggaagtgtatattacgtacacaagatcagagggtttgttaatacactctagattttcactctttccttcataggaaatcgaatctaaagccaacatatcagccttcaaactatcttgaaaacgatgtaggatttgcttttgcgtcagtattaatttagcaccgctatcttctataatgaattgtaatcgtgatgatggatggttcggggaaagcggcagatatgctccgcccgcttttaatatcccgaaaattccgacaaccatttcgatagatcgctctaccataatacctacaactgtatctgaaccaactccaccttcacgtaaaagacgagctaattggttacttttttcatttaattccttataggttaatgtttcttttttaaagataacagcaacctcatctggcgtacggactacttgttcttcaaacagcttttgtatacatgtactcatccgggttgtatcactcctttagttacaggtattttttcaatggcacgtttcgcttttttagcaaatcccttaccaagtaatagctgatgaatctgattactcccctcaacgatctccattgttttagaatctctaaagcaccttgatattgaataattatcattacaaccaagtgctcccataatctgtacagcattcgttgaatgccttgtacctgagcgcgatgcaaaatattttgcaatcataatcttttcagtagcatcagctcgatgctcatttttggccttacaagcttctaaactaagtagtatagaagcttctaaatctactcccatatccgtaatcatatgtgaaatcatgccatgatcaattagagagttaccaaatgcacttctatgcaatacatgattcccacatatttccaaacaagtacgtaatacaccaagagcagcaaaggcaattgaaatacgcccaaattctaaagcatacggtgcaaggtaagtaaaagcaaatcctggtctaccaatgatattttctaaaggtatttctacattattgaattcaatttctgccaaatatgcagctttaaatccaagcatgtctcttatatgagtaacatttacacccgcactatcttttggtactaaacaggcaactggttgttcaccatttagctttccaaataccaaaaacacatcagcagctgcaccaaaagtgatccacttcttcactccattaagaattaatttatccccgtgttgatcgaagttcgttttaatcatatttaaatctgatcctgctccaggttcagtaagagctaatgcagctatttgattaccagatgcaagtaatggtaaccactgatttttttgattttctgttccccattttaaaatcgtttctgttaccatcgtatggacattaaataatcccgaaagagagacactacctcttgctattgcttcagtaaataacccatacgttacataatcccactctaatccaccatactccgctggaagtgttccacctaaataaccatttttagcacaagtctttattatgtctgatggaatgccctgttcaatctcccaactattagcgtaaggttctatattttcataaacaaaatccaaaaaattctgatacattttatattgagatggctctaagtattgtttcatgtccattaccgaaccatttgcttatttcttataaaattaccaatagaatttacagacttatagttatccatatctaagtcatccatagttacctttatggcaaattctttttcaagaaaagtcatcaattggattgcaaataaagaattaactaatccttcttcaaaaatctcagtatcatcattaaattcaatacctacatgatcttgaatatacatatgaataattttttctaaatttttatcttgcattttatacacccctatttgtaatttttaattttaataagcgtaaaaacctttaccactctttctaccacattcacctgcatccaccatctttttaagtaatggacaacatctaaactttggatcttgatattcctcataaagtacattcaaagaatgtaatactgtatctaacccaattaaatctgctgtttctaatggacccattgtatgtccaaagcattttttaaatatatcgtctacctgtttaggcgttgctacaccatccattacaacccaagccgattcattcatgaataagtgggagatacggttagaaacaaacccagtctgatcattaaccacaattgcatctttatctaattgtttgaggaaagattgagctttttcgaccgtttcatctgaagttaaataccctctaataacttctatagatggtttcatatataccggattcataaaatgcattcctattattttatctggacgctttgttactcctcctacttttgttattgagatacaagacgtattgactccaaaaattgtatcctttttacatatctcatctaatcttctatagatcggctctttaatttgccagttttctggaacattttctactatataatcacattcagccacttcatcaagattagtagagctacttattaacgaaagtacttcttccttatgcattctaggaaatgctttattaattagaggagcaaagcgaactgtctctaatattttctcttccgctatttctaactgctcttctgtaacatcaattaataccgtttctagaccatgcagcactaaatctactgccatgccgatccccattgttccagcacctacaataccaattttcttgaacatttatccatcatcgctcccttaatatatttataatttatatctaaaaacttttacattgaagaactctttgcaggtaacgtttttgttctctctctttaatctgtttttcagtaagtgctgttttcatcatttggattgcttcttctacatcacttttctccactgaataccccgaattaattttttcttccaattgactttggaccttttgaaatgggagtactacctttttctgataatcacttaaatctgtattataattttttgtacttacaactacagttaaacaccctgatataacttcttcataatcagattcttgtaatgtaaaagaattttttgtatttaggatatctttctccctttcataattaaatgtcgatatagcagggttaatagcttgcagaagatacttcaagacttcctttggtcccatttcaatagctttcatagacccttgattcattagatagtgaatcatgtccaaccatttcacaggctttattaattgtaagtaaaggttttctcttatattttctacacctttatacattgaactatcatgattcgctatgacaggtactaatggctgtttcatatctatattttctagtacactcttatatttttcagcagcaggttgcatcataggagaatgaaatggcccacttaatttaagggggattgcaattcccccatgctctactaccatttcacaagctaactgaaccgcagagtttgtaccagaaattgatgttttatttggagtgtcataagccgatatatatacttcctgtcccttggttaacaattctgaacaaataccttcaacaatttctggagcaagattgttaacccatgccatagttccatctatagtcaatgcatagctactcaaaatcgtactacgttcttgtactaattttaaggtatctgaaaatgcaattgctccagaagcacatagagctgtatattctcccaaagaatatccaatcattgcctctggtttattgcctatttcctgttcaaaaactcgaaaagctgccatgctagttgttactaaagcagtctgtgaattttgtaacttttcaaggtcagctttgtatatcttctccatacaaagggaagccatgtctatttttagagtgtcacttgcttcttcaaatatctcacgtgctacagggaagttttcataaaggtacttacccattccagaataatgggatcctacgccaggaaacataaatacaatattcatctttttatctccctttttttcatcttaagctatcttcaactctatctaataaagctcgtccctcttcagtttttcttaaattcactaaatcaactacatagcgaatatctgatacatcattccatcctaaatccagtgcaagattcatatgctttaacgaaagatcgattctatcaattaatgaataaccacatgaaagtaaaaagtgatgccatgcatttaaatctcctacagtacgagctttttgtacaaactcactagctttattaaaatctgaatagtatcttagttgatggtatgcggtaaaaacgaaattatctaattcgttataaggaaacacataagctgtataggtttgaagatttgtgaatccaacttttcccgctagtttaatagatggaatacgaaaatcctctgtcttccaatgtggtgttcttccttgttttaaacagtcatccaagaatgctcttgcagccaaccaagcataccctttacctcgctggaataaatcataagtattaattccaatttccacatcagtatctgttgcaaaaaccgataagcaactagttacaacttgttcatgtaccattactacataaccaaatccatttcggatgaaatcctgagttgactcccaaaaatcaacaatatcatcccgtaccattgcgaactttttatctgatagcatgtcgattgtaatgcgttccaccgttacctcatcaggcatattaggtttagataacttattataagactccggatcaaaagtaaatgttactcgagtgtaaggtttaggaataaacatttgcaattgttcctcgacaacctgtttccattttgattcgggtaataattcaacctgaaaaaagtcatcccctatctgctgagcctcaggtgcaattacttctttaataaaagttggtagacttgaaacaaaattacttgtaggatcacctaataaataaaaaatttcttgttctgcccatacaagtgcacatctagggttattaggattatccacataaatatgtcccttattgtaaccatgaactataccattcagtattggatggttcttataatcaacgagaagtggagatatttgtttgaattcatccttttcttttaccaattcataaatcatattcttaaaagtcctcccttttgagaacaagtgtgaagtgcatgctgcgcaataattggctgaagtacctgcgaggtaccttcaataatttctaaaacctttgcttccctaaataaacgctcaacaggatattctcttgaaaacccgtttccaccaaacacttggacagcgtttgtggctaccttcatagccatctttgaggcaaaatattttgcaatggttgtttcaattacagcatcagtatgtctatcctgacgctttttcccagcctcttggcataacgaacgagctgcttttatatttacacttgcttctgctaaaattgtttgaattgcttcatattcacatatatatttatttccttgttttcttcttcttgaataagctaccattgcttctagtgcttcttgagcaatggctactcccgcccaggcaatactatatctaccatgatcaagagctgtgttaactacataactccatccacccccaattggtcctaacaaattttcagctggtacctttacatcttgcaaatgaatctcagctatatgcgaggaattacttgctaacagtttactcattttatttgtagaaacacccgtcattgaccgttcaacaataaaagcgctaacttttccctcactagacgcaaaaactaaaaaacaatccgcaatgtcagcaaaagaaatccattttttgtgcccattaagaataaaatgatcattaacttgtttataggaagttccaacagcttttgcatcagaaccaacctctggctcagttagggcaaatgaaaataataggttcccctttgccatctcaggtaaccattttctcttttgctcttcagtcccccaccttttaattgactcccctactaaagattcatgaactgtaagtaattcacgaaccgaattacaagctttaccaatgatttcagtaagacgaccataatctaaagaatcaagagaaagcccaccatattcttttggtatcgttgcacccaatacaccataacttgagatttcttgtatcacatcatagggaagctcttcattactttcaaactcacttgctcgaggccgaagcttcttttccgcaaactcatcaactactcccagaatctcttctgcattactcatactgtgaaattcccattcttctttttgttaattagatcaaccatattattaatagtagaaaagttaataatatcaagttcatcattatctactactatatcaaactccgtttctatgaaatttaacatttgcatagcaaagagcgaatttacataacctttttcaaatatgttgtcatcattagcaacaatagtttcctctgcattaaaaataataagattttttttaatgtattgacgtattttttcatgattatccatgtaattactccttctgagacctgggaaatcaattaacctatatcccaattaaaatcagtctctatttttattttttctttctcctgagtcgcagataaaacaagttctttttcctcacttgttaacatttgaatatcttttagactaacattaggatgagttgttatttcttctaatagaaggttaaatcgccgtccaaattctactattgttgatttatcaaataaagatgtagcatattcaaaagtgaattcatatatatctttattttcttcagcaataagagttaaatcaaacttacttgttagtgtatctgtgtttgtttccgtgctaatttctaatccatccacaactgtatgtttttcatccgaattttgtaatacaaacatgacatcaaataaagcacttcggcttaagtctctagaaagatctaatttttccactaactgatcaaatggatacacctgatgttcgaaagcttctaacgtatcgtttttcacttttttcaagtgattaataaaagattgatctggatttatttgataacgtaatgcaattgtatttacaaacagccccataagaggtaacagatcagcatgcggcctacctgcaactggtgatcctataatgacatccttttgttccccatgcttgtacagaaaaatagtgaaggtagccataagtaacataaaaggtgtcgtatcagtttctagtgctattttttttattttccgagtaatttccttgtttacttggaaattatattgttcaccctcaaaactctttacaggtggccgacctcgatcatatggtaattcaagaactggtatatcccctgagaataattcttcccagtatttctcatggatatcaaattctttagaagataataatttttgttcccacacagcataatctttatattgcaaacgattttccggcaatgtttccccagcatataaggccttaaaatcatgcataaagatacttaaagacacgccatctgttatgatgtgatgaaggtcaattacaagtaaataactattatcttttagctcctttagtccagcccgcattaacggaaccttagaaagattaaatggttgcaaccattctttataatctccctttatcatttctagctcaaatgttacctgttctaatactctctgtactaattgatccccctgccactcaaactgtgttctgagtatttcatggcgtttaataagcttttcaaagactaattctatccttttccgatccaccgttcctttaagaataaaacaacttggtacattgtatgtcatctgtaccccatccatctcttgtagtaacatcattcttttttgagtcgatgaaaccgggtatacctcagattccggtactatttctatctcttgcaacctattttcttttgaatttttaataaaatgacttaaagttcttattgttggatactcaaaaagatttgctaatgataattgcacattaaattctttccatattttagcgttgattacagtagcatgaagggaatgaccaccaagtgcgaaaaaattatcttccacaccaatacaaggattacctataacttctttccatatatcaactagctttctctccatattatcgagtggttttacataattagtagtctcttctatcgatggcgaagaatctatgattacattctttgtattaccttttataacagaaacaagaaatgtcattatttgttcagctaaattttgctcgtattctgcagcatggtgaattttatctgaaatgtttactattccttctttagttactgattttgttaagtgcatttttatcaatgatccacgaattactccccaattagcagctgctgtcttcatagattcagcgatagtttggaagtccgagtgataacgctcaccaagaaacgaaagcatttttgaaaacttcactcggccatctacaacttgacctaaatgtgagaataacggaacatcattaaagtctaaatatccatctgtctctttatttaaatcaaacctacttattagtttcgtagcaaaaaggtgcatttgtgaaaaaatatgtttttcatcttttatatgttttatccaatttgacaaatcggttgtaattgattgtatgtctgtgatttcatcttcagtaacttttaaagtacttactttttgataacccttatgaaaaagttctgttgaaagttgtgcatttttaaccataaaatatggatcggtaataatgaaacagtcttcttcgggctcatatcctacaataacaaatgaatgaacaatatgattttttagataattctcatcccaaggaagccagtatgcattcatggttaccaccacaggaaatcccgagtataattgttctaatataatttcaaatccttcatcggatgaatctgtatcaaatatagtactttttataccatgatatttttctaaatcacttacaaaataaccagactctgtatataaaccatcccctagatttccattatcgacaggagaaaaaccaaaatcccataatctagcgtacattaaataatgtttacgcttaaaccaattagctaacgtagcaattacatcatcaatacaattctgttcagaacttttacaaggctcaacatcatataagattgaagaagtataatttcccatttactcacctctatatttttaccaacaggaaaaactattgtaatttggttatttctctatactaagttgacagagatatgtatatcttctttaaaaatctatcaattattattaacgcatttcatataaagaatcttatttctcgaatcacttttttattttaatcattctataataaggaggagaattccctaactcatagtcaccagaataaacactaacattccagaaagctaagagggaaagctcctttaatcccacagtatagcaagtgtaaatttaaactcttaaaagtcgtgtttacaatatgaagtaatactaattatttttcttttctgctatataagcagctagttgtttaatattgcgttttgtatatgcgactaagtcgtccgtattaagattctcgttttctaaagcaagatcaagctcaatagctagtagagaatttcctcctaagtcaaagaaatcatcctctacaccgacagcttcaatcttcaatatacttttccatatttcaaccaaacgagattctaactcattactaggagacatcatactctcctcctcattcttaggtaaagatctaggtgaaggtaaggaatgtcgatcaacctttccacttggtgttaatggtatgttttcaacttcaacaaagaaagtaggtatcatataactcggaactaatttagcaagatgcaatttcaaatcagaaatggatacaggtgattttgctacgaaataagctacaagttttttctgcccatcttcatcttgaatgtctactatcactgcttctttaattgcatgatgtgaagataaagcatctaaaatttcccctggctcaattcgatatcctctaatttttaattgttcatcatttctaccgaggaattctatattcccatcaggtaaccagcgtgaaagatctcctgtcctgtacattttctccccttttacaaatgggtctggtaaaaacttttcttcagttaatctcatttgatttacatatcctcttgcaagcccttctcccgcaatatacagctctcctaccgcgccaataggctgaagtctctgtttttgattaagtatataaagccttacattcggaataggctttccaataggaatagtattatagttttcactttcttgaagtgaaaacgtacttgcgataactgtcgcctcagtaggaccatacatattttctatttgagtcgatagtcgatgctttttaaacttattaaccacctcatgtgtcaaagcttcacccgcaagtaatatatacttcactttatttaaaacctggcaattttcattattaagtgtatttacgaaagctctaaacatagacggtacaaaatttaataatttcacatcatatttatctatagttcttaaaattgctcttgggtttcgatgttccccattgtccattattactaatttactacctactatggtccacccaaacaactctagaacagatacatcaaatatataaggtgtctttagtaaatacgtatctgattcatccataggatataaatgagacattgaaaataagaaattcacaatactacaatgttcaatcatgactccttttggtctacctgtagaaccggaggtgtataaaatataagctaagttatttgattttccagcaacttccaggttgcttgtatcaccaacgtacaaattttcttgctttaaatcaataatctctcctacaaatggaatttcacctacgtatttagattctgtaagtacaaattgaggattacaatcctctaaaatatgttccattcgacgctttggatattcaggatcaattggtacatatgcagctccagattttagcgcagcaaatatagctataatcatttctacggatctttccacaacgataccaattttagtttcctgatctacacctttttgtctaagaatacgagcaagctgatttgctcgattattgatatacgaataactgtacggtatatcatttgaaataactgcgatttcttctggtttattttcaacctgatcctcaaaaaattgatgaactaatttaccctgagtaaaatctaattttgtattattaagttcatttaacatccttgtggattcacttttacttaaaacattaacgtcttcaattttcgcttcaggattagctaccatccactctagcgtatttataaaatgcatcataaaccgctctatagtttgcggataatatagtcctgtcgcgtattccaattctaatcgcagaccctcttcttccggaaatacttctatactcatatctacctttgaagcttgatgcttaatttcgtatgatttaaatgtaatatcttttattttttctgatgttcttccgatattctgcattactaacatgacatcaaatacaggatttcgattagtatgataagccatgtctaacttatttactaactcatcaaatgggtattcttgatattgaaatgcttctagcgcattttcttttacttcatttaagaattgaattatcgtcttttccgctttaggatgatttctcataggtagagtatttacaaacatacctatgataggctcaagatcatgatgaattcttcctgcaattggagaacctactataatatcttcctgttgcgtatacacatgcaatactatatttagtgacgaaagaagtaccatatataaagtagcttctctttcatccgcaaaggattttaatttattagaaagttcaggtgttaaatggaatactaatctatcaccttcaaaagtttgatttagcccacgtggcttatcggttgggaacataagaattggtaactcacctttaaacttctctacccaatactcttcaatttctttcagcccttcatcatgtaaacggttggtttgccaattggcataatctttgtattgtattttaataggctctaaggctttgcctgaatataaatctataaactctttttctaacttcgctaaagatactccatctgctattatgtgatgaagatcaaatagtaacagatattgattgaattctaatttcattaaaccgacgcgcataagtggagccctatctaactgaaaaggacgaacaaattcctgtattagctcttcaattgttgatctatcagatttatataaatgttcaattctaatatctaaactatcatgaataaattgaactggttcacctttaataaattggaatgaagttcttaatgattcatgacgttctactaattctttgacacattgttctgcctttataaaatcaaactcaccttctattaacattgcacctggtatattgtaggcagttcctattccagcaaagcggtttaatatatataatcttttttgtgaagaagaagtttgataaaattctctatcaggtacgatctcaatttgagaataatttttcttcccttcatatttctctatatactccgctaatagcataattgtaggcctttgaaacatttcacgtataggtacatctacacctaaacgtttatatatgtgtgaaacaacagaagtaatttgtaatgaattacctcctaattcgaaaaagttatcattcacacctattttctctattccaattactactttccatatctcagagagcatttgttcaatttcattacgtggttcaataaataaagctgtggattgctcccaaattggatctggaagagctttccgatctattttaccgtttgatgagattggaaactgctcaatcgggatgatgtatgcaggaatcatataaaaaggtaaatactctctaaggaattggcgtacctcttctactttagctgaagaattcataacaacatatgcacataaaaccggagcatcttctccctcttttttacgtgtaattacaatagcttcaccaatttcaggatatcgtaatagttgcttttctatttctcctaattcaattcgtaatccacgaattttgacttgatcatccatacggcctaaatattcaagatttccatctggtaaccagcgagccaagtctccagtacgatataccttgtcatctataatagaagaacctgttttggtgatttgtataggaacaaatttgtccatagttaacttaggttgatttaaataccctcttgctagcccttctcctgaaatacacaactctccaggaattccaacgggttgtaattgttgattatcacccataatataaactttttgattggctagaggtcgtcctattggtaattgattcataagttctaacttatcgtgctgaacatgataacatgtagaatctacagtagtctccgtaggtccataagcatttgttaaattaggttggcagttcttattaaataaaccaaggaatttccgcgctaatttcggtggtaattcctctccagcaataataaaatgtttaaatgaatattctattttttcatctataaaattagttaataatcgaagatgcatcggcgttccatccgcgatatttatttgcttttcttgataaaaattaattagcttctgcccatcagttcttgcttcctctggtactataaataaactatttcctaataaaagcgcaccaaacatgttttgtactgaagcgtcaaactcaaaaggtgaaactaacccgattcgcatagaggaactatatttatcatatatttcattttttaacccgaatattaaatttacaacactacgattttcaatcataattcctttaggattacctgttgttccagaggtaaagataacatatgccaaatcgtaaggtgtacttactgaaggtaaactaaccaattctgtttcaagtagttcattaaaacttaccatactacaatcctggatttcccttgtaaaatcttcactaataacttctggttttactatacaaagtggagatttacattcttttagcattgcctctatccgtttatacggcaaatatatgttaataggtaaataagcagccccactttttaaaatacctagcaatgcaattactgcatcaattgatcgatccatcataaggccaacaatgtgtccttttccaattccttttttatgtagagaactggcaaccagatctaccttttcttttaattgagcgtatgttatttctcttttgtcatcagaaacagcaagtttatttggattatgcatgacttgttcttcaaataactgtatcaccgttaaatgatgcgggtaatctaactcagtttgattaaatgtgattaactctcttatatcattatcactaacccaatctaaatctatatgcggcgtattcggttgtagtaaagcttgctctaacaagtctataaaatgatgaccaaatcgcataacagtagatgttttgtatagatgctcattaaaatacatatcaacttctatacacccatttacttgacggaaagagaatataatctcagcattgctctcacttaaataatttaaatcttgaatttcctctagcaaaattgcagtacggaacggataattacgcccctctggaaggtagttactcaaaaccggttgtaaactttccaatgggaaattttgatgttctaaagcattaaccattactgtactaacatgctggagaatttgtctaaatgtcatatgttcctcaagaccatgtcttaaaactaacaaattattaataaggttagtatcactgtcttgttttaaaacaggtgtaccaatgcatatatcttgcaatctagtatatttatttaacagcaaggtaagtccagcagtaagaatcatgtgcaactgaagatctgatccatttgctaactttaaaatcttctcggacaattcctcttttagttttatgttaacatttgataaattcacctgtttgtttgatgtccggtaatcataagggaaatggcagtcagccagttcccctgataagttttctaaccaaaattctctttcctttattcgttcatttgcggcaattactttatctttatttgctattcgttcaaccatagttactcactcctgacaataatcaattaaaagttaaaatccccaaaatctactgataccttaactggttgcagttcttgaatttcttgtttaaatgaaatatcttttaataaaatttcaggatgatctacaatttgttcaaaaatctcaacataacgctcacataacttttgaaccgtgtccctagtatataaagaggttgcatattccatagtcagttcaattgtatcttccaattcaaccactcttagcaataaatccatttgtgcgcgcttaaagtcgtgatcatatgtccttagttctaaaccatcgataaacatatgatctgcatccatattttgcataacaaatgaaacatcgaaaagtgggttcctattatacgtgccctgaagtcctaatttattaaccaggtcctcatattgacatttttgatgttcaaatgcttgtaagacctgctcttttacttcaaataggaattgagtaaacctttgttcagctcttggatagttccttattcctaacatgtttacaaatactcctataatatcttgtaaatccgcatgcgggcgaccagtaattggtgaaccaataacaacatcctcttggccagtatatttacctagcaaaatattatatacagagagcatcagcgtatataatgtagtttcttcttttgctaataaacgcttaattttcttggtaacatttgaatcaatagtaaaggatattttactacctttcagatctaatatttcaggtcttgtataatcagtaggcatattcaagacaggtacaccatctttaaattgctctagccaatactgttcatgtttgagagcaatttctttttctttttcactttgctgccattctgagtaatccttatactgtatttttaagtttggtaatttctctcctgagtaaagcgcaaatagatctctaacaaaaatatcataggaaactccatcggttactatatgatgtaaatcaataattaaaatatgtttttgttcttccaatctaattaaccctacacggaaatatggagcattattaaaattaaatgggcgaataaattcattaattatttgttccacttcagattcaaagccctcaatttgagtaatatggaaatcagcatgatcatgaataatttgtactggtttatcatttttcatttcaatagtagttctaaatatctcatgacgcttaattaattgagtgaacgccttttctaaacgttcaatgtttaattttccattcaaaagaataacggaagtatcattataagctgtactttctggatacaatcggtgtaatacataaaatctcttctgagctgaagaaagctgataatgagatttaggttcagctggaacaataacatcaaattcactcttatctgcccttgaaatataatttgctagtttctcaatatttgatagagtaaagagctctttaataggaacttcaacattaaactctttatgaatttttgaaacaatagtaatagccttaagtgaatctccacctagttccagaagatcatcatgaacaccaacttctgaaactttaaatatatttctccaaatttttgaaagcttttcttctacctcattgcgaggtgctacatattcagtcaagagttgtggtctagaatggtataacgtagaatctaattcttcttccttctcatcattgaaagaatttaataacacccattgatcaatacgcgcttgcagttctcctggagaatgaatcagtacttccccttgtttccatgacagtgctatattaaaggcctgaactccttcttcaggtgtcatagataattcatgtacacttgcacctatttgcatatctttttcttcatcttcccagtatttccaatcactccaattgacacttatccaaggtagtttggaataacgatttatatattgtgcaaaaacatccatgtatatatttgaagcagcgtatgaaacataacctaatccacctaagaccgctgaaattgaagacattagaacacaaaaatctaagtctttatttcgtaagcactcttctaaattgagaagaccataaatttttgcagaaaattgttcctcacagtcctctttttcaagttcctgaatcaaattaaaagtctttccaccgagaatacctgcaccatgaattacaccattaatctttccaaatttttgttctgccttatgaattgcttcgtatagttgtgattgatctgtaacatcagcagcaagtacataaactttagatcccgtttcttctatctctaaaactttacgaattctgtccgaatacatcgtattttccttcaaatgcatatcccactcatcacgatttggcagacctgtacgtgtaagaagaactaagttggcttgtacagtttgagccaagtgtttcgcaagaattgtaccaatacctccgagtcctcctgtaataaggtaaactccattttttcgtaaaggcagtttctctttagctggctgttctagttgtaaaggctcgtaagtttgaacaaatcttttatttcctcgataagcaatcatcttatcattcgtatttgaaagacattcttctactaattgatttattaacctattcttccattctttgtttagaggtaaaacaacatcaacacttgaacaagaaagataagaatactcttgcggaacaactaatgacgttccaagtacagttgatttttctggaattaattcttcatcaccaatcacttgttgaacaccatttgtaatgattcgaattgagattgaatcagagatattcttgtctcctagtgcctgagttaagtagaacattgaatagaatcctaagttttgtttacaatttacatattcaattgaggcttgtctttcctcattggtaattccccacatatgaattattcttgtaggtaaaccatatatttcttgtacttcatccaataacttaacgtaatctgtacgttcttcaggatttataatgaagcgatcgttattctccttattaaaagcaaagccaggttctactgtaactactctctgccctttatttaataagtccttaactagttcattacctaaaccttcttgatctacaaaaacaatccatgtctcattcacatcatgatttggttcaaacaatgtagaacttttccattgcggcgtatagaaccattcagaaatgttgttattcttactaattttagattgcttactattaagcttttgacctaaatcatacggattaccttgtaatttataagatattttattgaaagaatacattggtaatgggatacgtcttctcttctcatctttataaaattgttcccaatctacagaaatacctgttacccacattcgagtgatgtgactgaataagaaatacatatctgatacatcttgttgaacagatcgaaccgtattaaatattctttcattaccattttcatagtctaaaaggcgactagtaagcctactaaggtcatttccaggaccaatctctatgaatagacttgtattgtccctattcaactcttgaattccatcagagaatcgaacagttccacgcatatgttttacccaataaactgggtttgttgcttcttcaggtcgtatccaagtaccggtcaagtttgacaaataaggtattttgggttctctaagtgtcaatgtactaacataggaagcatactcgtccagaattgaatccagttcgtgtgaatgtgctgctccttctattgttactcgcatacacattaaacgctttttctttaattcattttcaaaatctacaattgcttcttctgtcccagaaactatacaagcagggccattaactaccgctaaagaaatggtatgttgatattctttttcaaaagaattaatcaaatgaattaattcctcttctggaagtggaacgctaagcattactcctgcaggaagactactcattagctgacctctttttacaaccaatttaagtgcatcttctaaagtaaatacttctgctaaacaagcagccacatattcaccaaatgaatatccaatcattgcttcaggtttaattccccaacccattaatagtttcgcaactgcgtattcaaacgcgaaaagaattggttgactaaattccattctttttaatttttccgtcgcctcatcaatactgaaagtagttgggtataacacttctttcatgtttacattcgtaacagattgaaggattgcaaagcattcatccatagcttcacggaaaattgcctcttgttcgtataattctaaccccatgtttacatattgcgatccgttcccagaaaacaggaagttgattttaggatgttcctcttttacatttgcatattgtactcttcttccgtctggctggtttaattgttcaattccttcttgagtactggaacaaactaaagctctcctatgcttgaattccttacgtccaatttgcaatgtataactagcgtctgccaaattcaaatgaggattctgttcaaggtgatttcctaaattcaaagtcatacgatccaaagcatctttcgattttgccgaaatcattaacatctggtatggtctactatttgaggttgcttcaagctttggtgcctcctccaaaataatatgtgcatttgtaccaccaataccaaatgaactaacacctgcacgtaatggtttattatcctctttccactcatttaattgttgatttacataaaaaggtgtattttcaaatccaatttgcgtgtttggttttgtgaaattcacacttggcggaagaacctgatctttcatcgcaaagaccgttttaattagaccagcaacaccagacgctgcatttagatggcctacatttgctttaacagatccaattggtacagattgtttttcattagagttaaacacttcactaagcgccttgatctcaatggtatctcctagtttagtagcagttccgtgtgtttcaatataggaaatggactcaggttctacatttgcttcatgttgcgccattttaataacttctacttggccctctacactaggtgcagtgtaaccaattttccgattcccatcattattaatcgccgttccttttattactgcatgtatagtatccccatcatttatagcttcctgtaaaggcttcagaacaacaatcccaacaccgtctccaaaaagcattccatttgcattttcatcaaaaggacgacaatgaccatctgaagaaaatagcattccttcttggtaggtataacctgctttttcaggttgagttaatgtaattcctccagctatagcaatatcacaatgcccctgtaataatgcttggcttgcattatgaatagccaccaatgatgttgaacatcccgtaaagatattcatacttggtcctttaaggttaaatttgtaagaaatttgagtactaagcgagtctttgtcgttaagtaatgaaattaaaaattgcccagctggttcatttgcctctgatagagtagataacacttgccaatataagttaggagatgccccactatatacaccaattaggcccgggtaggtctcaatattatatccagcatgttcaagggcagaccacgcacattcatggaatactcgtagttgtggatccattaatgatgcatcttgaggtgtataatcaaagaatggagcatcaaaattatcagtaccctccaaataccctttcgctttaacataattagggctttttacttccataggattcacaccagattcaattaactcttcatctgtaaaaaattgaatagactctgtaccagactttatattattccagaattcatttacattctgtgctccaggaaaacgtccatctattcctataattgcaatatcgttatcttctttcgtttttcgattaaaacgttttgtatgtttaacttgattcttttgcttatctccacttaagtatctcgctaaagaacgaatacttggatactcaaacataactccaattgaaatctgtttttctaatctattaattaatctctcatgaatttgaattatatgaagtgaagttgcaccaagatcaaagaaattttcatttacatttacagtatcaacactgtaaaactctttccaaatccctataattatttcctctacttcatcttgatttctgaacttatctcccgttttcgtttgagtttgagtttccaatccagaaattcgtttacgagaattcagattaatccattgatcaaaacgtttatttaaatctcctgaagaaataattacctgatttaaaccacttaaaccaagcacacattggaatgttttttgtccttcctcagatgtcatttcaagcgcttctatactttgagcattgaatattttattaacctgttgagctcccgtgtactgccaatctccccagttaatactggtccatcgattattagatgtattactcactttgtctgaaaaactatctaagtaaaggtttgctgctgaataggctacaaaacctaatccacccaaaataggtgaaagtgatgaaacaagataacaaaaatcaagatcataattactcaataacttatcaagaactagcacaccatgtactttaggaagaaattgctcttcacattcaatcctacttatcttttccattggacactgagctgatttaacacgtaagacacctgctgcatgaattactccatttatgtgaccaaaattagcctcggcctgatgaatcacgtttctcatctgctcttcatcagcaacatctgcaacagctgtcattacttttgctcccaatgactccaacttctgaatatggttaatacgttgacataattgttcattttcaatctgctcgtgaagaatctgatcccattcttcacgatcaggaagagctgttctactaactaatattagtttagcctttactgtacgcgccaaatattctgctaatttaaggcctactcctcccattccaccagtaattaaataaaccccttccgatcgaatattcggaatttttgaagctaattcattttcatttattactagcatttcacttactttttcatcaggtataggctcatagattcgaatgtaacgagtgttatttcgaattgctattacagtgtcaataatgtccgtttgaatttcaaaatataagtttgatattaatgcttcttcattatcagacaacataaaatctacactacggcatctaatatttggatactcttgcggaaatacttttataggagccaaaagagtagatttttctgcaataatagactcgtctcctactaccttttgcatattattcgtcataacatttatattgataggataaagtaaattaaatttactaattgtctttgcaagtgatattaatgaatagaatccagtatctaaggtctcgatacctaaatccttattatcgacattccataggtgaacaatctcctctggtaaacattcttgtttttgtagctcattaaataactgataataatcttcttgttcagtagggcatattgtaaattcatttaaactaatctttttatatgaaggacccacaccgactgttataacacgatgtccatctctttcaagtttttctttaagagctaagcctatatgctcattgtctaaaaataacaaccaacttttagtagatcctttagttacatctacaatttctttttccatccaccctggagtatagaaccactcagctatattagaacgtttctttatcgatgtttcttcattattagttatattttgctgttcagctggatctatccaatatcgctttttctcaaaaggatatgttggtaaggcaatacgtaatctatattcctcttcatacagtttactccaattaatttctacccctagctcccacgcttgtcccaatacctctaacaagtcgtttcgtaaaataatctgattattattaatttcagaatttaataactctccaatatgtacaataacagaattaggatttacatccttaacttgtgttagaagttctactttttctccatgcatccattctgtctgtaactctgtatagttctcaactaattgattcaggacatcttctggcttaagagatttattataaatatctgaaaccattccagctaggcctgtatcaataatgttagaaggacgtacatcacattcaattaatacatcaataatcgattgcaagcagacgaagaaggttaaatcttcaaccaagctatcatctgttcctttaaagaatgcttctttcaatgcttttccagtatacatttgggcatcagtcatattacgctcaaatacttgtaaaaataatggttccttttggtatagttcttttacattctcaataattgatgagtattcgctaggtaacacaaataccaaatctggattttcttgtattttcacgtgaaaatctttaactgtttttaaattgtctatggcgctatctatatccttacataagaccgctcttctatacggaaatggtcgacggccagtttgcaatgtgtatgctacatctgctaattcaacatctttattagattccagatattgaaccaaatttactgtagcattatttaaagcttcttttgatctagcagaaagaaccattaactttttctctctagtagaagcagaacttttaactttaggcgcttcttctaatacaatatgaacgttagttccaccatatccaaaagcactcacacctgctcgaaggagatcattatcttcactttgccaattcaccaaatcagtattgatataaaatgggctatctataaaatcaattttcgagttagggcgcttcacatttaaagttggcgggagttgtttatgcctcatagataaaactgtctttataagtcccgtcacccctgcagctgtatctaaatgacctacattactcttaacagaaccaattgcacaaaaagatttcttgtccacatcttgaaacgctctctttagagcctctacttcgatagaatcccctaatggcgttgccgtcccatgcgtttctatataactaattgtagaaggatcaacttcagcaaaactatgagctgcttgaattacttcagcctgtccctcaacactcggagcagtatagcctacttttcgactaccatcattatttgctgctgatcccttaattacaccatatatcgtatctccatcagcaatcgcatcttctaatctctttagtattaccatacctacaccatcactaaaaactgcaccctgggcttctgcatcaaaagtacgcactttaccatcaggtgaacttgtcattccttcatggtatttataaccattctttttaggatacgttatagatactccacctgcagctgcaatagagcattctccagttaacaatgatctacatgcaagatgaatgctcaaaagagatgtagagcatgctgtatataatgtaaaactcggtcccttaagtcccagcttataggatgtaagcgttgaaattgcatctttataggaaagagtacctgcctctgaaaactcaaccacactatcactgtttaataatggcgtgtgcttcatccaattaaaattagtagatgctcctacatataaccctattaatccttcataatcaaatggattatagcctgccatctctaatgcttcccatgtcgtttcctgtaacatacggatttggggatccattattttcgcttccctaggtgtataagcaaaaaaggattcatcaaaatattctacttcctccaaatacccttttgctttcacaaaattaggatgttgtaaaacatctaaattaacaccttctttaattaactcatcttcagtaaatgtagaaattgaatcaacaccattttttaggttatcccagaattggtttatttcatttgcacctggaaatttacctgccattccaataatcgctatttccaaaccagttttactatcatcttgatgcttcattttcactttcctcctattttgtttaattcggattttctatgctttacatactcttagctacaatatttagagctaatacttctatttcataaacttaagcaaaagaaaaaacacatgaaattacccataaagtagctaaagtgatttacatatctgacagaaaacaaaaaattttaattacgatttctattcctggatttcaatgatattttgagcactcatttttattctaaaaacctaatactttggtaataattctgttaatattacactttatgtagttagtaacatattcacaagaagttttctttaagaaattaatttgtagagtaataattttgtaggggttttatgttattaaattaagcatactttttccaatatcatatagaaaaaaacaaaaaagtgacatacagtgaatattgagaaataaaattcatttattccatatctaaccaaaatagaacgaattttcaattttaaattagattttcttgcatttataattgcattctctataaatcatctatgttgagcttttaaacgttaaacatcaatgaagttatatgcgaaattttttattttagatgaggatctatacgtgaattcattcaagaggaattacatatactacagatttaatattcttcataaagttatatacataaactaaattccttcaaacgttttaagaaaatattgaggatgaacatcgttagtggaacgcttcctaccgaaggcaaacttatttctaggattgctgacttacaattttgcattgtactactcctaagacagaccaaataagttcatatgctacagtactgtttatccttccgttcatgttgttgattttctgttatgttttgatatgtacagacaatatttttatcttatacccatagctattgtcctacagacactttatattatcttcaaacccactatttcacgaaactgtaaaactaaaaccactaaatttccgaataaactgaaaacttatgagaaattgacaagaaatctcaataagatcttttcaatatatcttaacttcaaacgtatggaatcaggactcaataatgatgctatacagggaaatattctactaaatagaattactaaaagagatatctatagagagctcggatgttaaagaggctactttagattttgttgaagaaatatcacaaaatgtagagcaaggtgcagctgtaaaaccctctcttcttagacgagtaaaagcggctttaactgatattaactcaatggttgctcattactcccaagttgcagctaagattagccaattcattagcataatttgaaatatcactttttgggaaaattcaactacaaaattaaaattatttttacaattcgcaaaaaccgtcgttaaataaccaaataaaaatccagtgatatcagtatgtttgcttaacattactaggttctatgattttaacattttgtatattttgaaaagctcgttttgatatgtcgaatagcttcgtatattaaaaaaattaatattcataaaaataaatattaatttatatgtttttataaacatattgaatttatgatttttttactacgggaggaagaattaaaatggaacatattaatttagtatctttagttaatgctaaaagtaaaataatggatgggaagcgatatattatacaccaagtcggcataagacttatcattatgaattttatcaaaattcgcaagataaaagtgcacataaggttattggacaggaatttgataatgtaattgttgtaatagattctcattttatctattataaaaatctattaacaagtaagaaggattactattatgataatataaaaatgctctatcagatggtaacaagggctagaaaaaaactgcacattgttatcattgataatgaggaaatcttagagaaatgtttaaatattttaaaatctaatagacaggtttcaggccaagataaaaagggatttttaaagaaatatctagaaattctagaatctaatggagaaattacagaccaaaaaattgaaggaaatcatgaacagcaaactttaacatgaaagaaacgatttttatatgctaacagcattttaatgaaaaatattaaaacataatttgaaaatcaataaaactcccataatgaacacaatataaaatataagagccttgttacatttttgtagtaaggctctttacagttttgcatgtttttaaatattttatgcagtaatagcaagagaatctaataattgttttatcatcaatgagtattcttgatccttattagtaaatgattttagatcatctaatatcatttttcttaacatatcgtcctcagtattctcatattgccaaattaagggttggattttttttattaaatcacttctatgttcgattaattcaattcgatcaagctttaactgtttgatagttttatatgcacttctacattcaggttttgcaaaaggaatgggtccttgaaatattatttgattttcgggggaatcaatatatggattaagtaacggtaaagtatcatcataataattactcttactctgattacattttgcacatccaattgtaagattatcccacgaaaatgttttttgagggaagatacttttaggtattatatgctcaatatctccataatctatatgaagtatcttactttcacagtatgcacatttagaatatgtttcttttaataatgcttccttgatttcttcgtgacgatatctacctttaatataattaggtactttttcaccagattcttcaaaacttaacaattcatttgtccaattgatttctttctccaccaggattgtcggtttggacgattttattaaagaaatcattagtagatacctccttgaaggattcctaatgcctgaggcaaatgatctctcaatccaactgtagcaagttcatcttttagtctactataactttcaggtgtaatttcgtatcctttaaaactctttaaaatctcttctaatttgttctctacccatagtggcattgttatagggacacctaatacatctcttaagatttctgaagcattcgacgccttattttcgaagtctaataactcgctaactactaaatgattttcattatattttagcacaaagatggaagaatctcttacagagtttaccattaaagggctatgtgtagaaattatgaattgtgcattaggaaaggcttgaagtaaactcggcattaatcttctctgcattgaagcatgtaaatgattttccgcctcatcaattaatacaatatatggctcgtatttatctccatcatacatatagatttgccatgctaaatctaatattgcacctataccgccagaaacagcatctaataagaaatccccactatttgtttctaataccacttcaccatctctaattgaaatctttttaaaacccaatgttggtggaagaagtacttttagtatttcgataaatcctaaaaataaatctaatgcttctttattttcattaacatgcgaattaccttcaccaaatagagctaaacttataagtgttgatttcatttgaaaggaaggggaatctccataactttcaaataatttattcattaaagagtggttaaataagctaaaagcttcttctctagaagcaggtcttacaggaatgtttccaactggtttataagaatacgctattctatgagaaggaatattgataccttttaaatctaaagaattattagtatagtaattgagaccaggagtttcataatttatacaataatttgctgaaggagttaaatctggaacaaataggtttgcagtcttaccattaaaacactctaaactcccaatatttatcttatcttgttgctctctaggttgaatttttcttctaccaccacttttatatttcaaagatgtagtagattctttcgatggtatagccgtttcattatagccccagccaagctgtgtgctaaacattcttagaattgtacttttacccgcaccatttgcgccagtcaagaccgttaacctaggatgaaaatcaatatcaactctttcaaattggttccaatcctttatttgcagattttttagtatcatttgtatcatttcctttttttgtaattccttcttctactttacaatcataatactttttgaagaaagttggttttcattttctatttcataacaaattattgataattatattataatccaaatggaaaggaattttaagaaatatagcaattttaaagtgatttcgaatccttgaatcataccatttggctaaactaatttaaattcggcattttgagataatttaactaaaaggagtcaccatacatgcccatcaacttaagaatttgcactacccccaagtgtcaaaaaacgttattcgaaaatgtacatatttattcaagcgttaatgtacatatttaagttagcatttataatctggaacacattaaacaaaaataccaagaggaaatatatatattagaaagcctttcaaaagatatagagatagatttcagcaaaatctctcatgaggcaatcggtaagatcctaacttgtgtggactttttagatacgaatcaaacattaagttggagggacatagaatccacggatacgattgttatcttcttactttccatgaacctattacatataaatctatcttgcttttacccgtgtcaatttcattacttacattactttaaaaggatgcattcgctttcgagtaatgtaacacagtattctcccgtgtacttggatcaagagaatatttatgaattagaccatgaagaagaatttgtggaattgggaacggacatgatcgaagagatgggcttagaagtctttcctattgaagaagaagagtatgaaacgctctctacactattcgacataccattaaatgaaataaagaaagtagcagaggaaacatggggtgctatagctgaaacaatagatggcatatcaccgaatcataaagaaaaaatatctaaattactagattgttatccggtgcagtattcttaccaaattgatgaagaatctctttatctctattatggcgaggaacctttatacggaccatataaatttgagatgttactagatttattggaaacaatctttaagcagggggaaacaacacatgaagacagtagcaatatttgatgctttagagccaaaaggaattgtaaccatccagcaatttaacaacgaattatcgcgtggagaaactgccgttacttttaaagatttttatttagctttaaaagaagtgatggagcaaggtacacaagataatacacattactctagtggcgtactcccaaaaggttgtataaaacacgaggtgttatctaagagtggtgataaacaagctgtttggattgaagtaccaaaggctcagtgggatattcatttttttgaacggccgtttcaacaagtaggctttccacgtctattatttcgttatacggtgtatcaaaaacgagttacgaatatctctgtctttgctgtaaaagaagatatggagttagaagaaggaatgaaattatatcaatttccttactctaatgttcatgctagtggatctgtatgtacgggtagagttgtaatacctgaattccggactttaaaagatctagaaacatttcacgttctattctttgcaagttcattcaaccatgaccttacatatactcatacggaaccagtaggagagttatttaaacgatttgaaaaccaaaggtttgatgattctattctaatagaatcggaaattactttttaataaatagcaggattatatataagcaaacatactaggaggatttttaatatgaataacttattcgatttttttgatatggaaaaacaaatagaggaaacaacagtaccagtgaaaaaagctgcttcagagcaagccactgctaaaaaagtagagaaaaaggaaaaagcaaaagataagacaaagaatagtaagaaagctaaggctgcaaaagctacagattgtctagataaaatcaatacaacaacggttgttcgtcacgtggtatttggagatatatcgttagtagattggtttacagaggaagaaattacacatggaatcgctgttcaaaatggagattctacagatgtaaggaaaatagaagcagaggacattcgcgtaaaattagagcaacgttatccctcatttgttaaaggcttaactgtcattaaatttgatgaggatacaaatgcactacttccgattttaactgtcggcgcaaaaggagcaagtactgtagagggacaatccatttcagattgtcctttttcttttttaagtacttggcgtgatcactttttacctggggatttcattccgaggaccctattaatggactttattattattgcacaggccatttctcgtaaatgtgattgcgaattgcatgctgatatctatttcaataaagagcgtggttattttatggactttccacgacagcaggtagcaactgaaattgtaatcccagaaacgaatatagagatgcagtctatcgctatgaaggttatggagatacacagtcatcattgtttctctgctgaaccaagtgatttagatgatcaaagtgaacgggctcctattctttatgcaattatcggcagaatagaagctgttttccctgaactgcgtgtacgcacttgtctagatggggaattttattctattaaccctaactttatatttgcaggagaatatgcagcgaaagggataagccaaaattacgatttaagtaggattacacttttaaaataaatatacaagggggcgtaaaagagacatattttaatgtctctttctttattatgacaacattaaaaacaattcacatttcaatgtttacaaagataaaaaattacatgttagttcttaaacaaaatgaacgtgttttagaggaaccaattcatgattataaactatttcaatttatgtgccagttagagatgaataacatacataaagtattagaaggacacggaaaagatacccatattgatataaacatgcatcaagaatatatagatacgcttgttgtgcagttgaatttacttcaatatgttttagacattgtacaagaggaaggagtcgtccatgctgcatcgatactattgaagcattcatttgacttgtataccgtgcatcggattacaaatttatcgattccatttctacgaaatttagagaatacactatcaaaagaaaaatagggggctataaaaatgagtattgttattgatattgcagaaggaaagaagattgtaccgcatattgtattagtaggtgctggaggaaatggtggattaattttacagcatattgctcaaatgatgagtattttccaattaaacggtgaaatagtagttgccgatccagatatcatagaaactaaaaaccttggaaatcaactctttattcgacctgatgttggtaaatacaaagcagaggtactggctcttcgatataaagcgggctataacgttcctatctcttcctatacgtcacaatacatagaagacatagaaacaatgcaacagttgtttggcaataaatatgatttattaaagaaacaacataaagacgactacttgtatctgccaattgtgattggagcagtagataatatgttttctcgtgaagtcttccatcaatcggataatcttatttacatcgatgtagggaatacagctgtaacagttcctaataattggagagaagtagataaaaggcattggacacctcaacaaatggccgattataaaagcagtggttataacggtcaagcagtatgtgggattaaactgaatggtgaggtcattctttctccgattggcgacttatttccagatgcttttacaaaaaaagagacagcaccaagtcaattaagttgttccgaattagctgcttcagaaccacagcgtgttattacaaataagttcgctgccatgactgttgcacaattcattaacgaactctttgatgaaggtaccgtatcaaatcactatatcatttttcaagctcaaaaggcgtttatgaaagctgcaccaattggtgagtaatgatataggaggggacaaagtgagagtgtatcaattagattccactcaattacaatgtacattaacaccaacaaacatgtgtgatggtgttctacaatactaccaatataaacagtataccgttgtatctgtactggatttatcaaagcatgattccgaaatgataccattgcttctggcttgtctagcagaggctctgattcatttctatccggattcttttttagctaaggataaatctgatctcttatattggtgtagaaagaacttcaaaggatttcatagtatttctgatgatggattcttgcgagacttcaagcaggtatacgaatgttatcaagcattgcaaaacgttggaaaacaagaaaacaataaaaaaaaatatatataatagcagggagaagagaaacgcatgtataatatacttaaacgtcaatttaattacattatccgaggggtgattcggattaacgaagaggtacaaagggaattggacctattggtgcaaaagattcgtgaaactgtatcttctgtccaaaaaatcatcctttttggctctcatgcatatggcacaccaaatgaagacagtgattttgatctctgtattgttgtggaaggtgtaggagaaagaaaaagggaagtcattaatcgtatcaattgggggatttacgatgtaatggaaacgccagttgatattttagtgtatgggccagaagagtttcaagaacgtgctagccgtactgtaactatggaacataagattgcactagaagggacggtcctatatgagaaatattgaggatctaaaagagtgggtattcatagcaaaatccgatttagattctgctatttacttatctgatatgaaacctttccccactgcaattatttgttatcatagtcaacaatgtgtggagaaactcctaaaaggatttcttgcactaaacggtagaccagtccctaaaactcataaccttttaatgctgcataaattttgttgtagattagatgaggagttctcattgattttagaacaatgcgtgcagctgaatggttatgctacagacattcgttatccttattttgaagcccttactgtgcaagatgggttaatagctatacaacatgctcaaaaagtaattcgtttttataaagagaccttaaacaagctaaatataaatgaaatcgtaatcgattaaatatagaggaaatacataaaagagagtgcctttaagggactctctttttctatctcaaaaaaaggaggaatgccccatacataaaaaatagaatcttatttttctatggggataaaaataaaatgatggatatatataaagaaattaaagaggaaatgaaaaaagtctatttatctcgcgattgttgttttgtaggttacagcgggggaaaagatagttctgctatgttgacattgctatgggatgcgatttccgagctgtcgctagaagatcgtacaaaacctattcatgtattaacttccgaggttggggtagaaacacctgttatgactgcttatatctcacgtacattaaagaaaatccaaaagagtgcggataagcaaaaccttccgtttatagtacacagtgtgagaccattaatgaaagattcatattggtataaactactaggtagaggtgttcttccaccaacaggaaatagtagactacgatggtgtactgattcccttaaagttaaacccatgcaacgtaagatgaaggaaatactaatagattcccaaactaaaaaagtagtagactgctttgaagagtatgatggagtccttgcgttggccgttcgtaacgaagaaagcgcacgtagaagacatagtattcaaaaatatgcagtaagtaatgaatctttattttcacgtcacaatgacatgaaaaatatactctgctttaatccagtcaaattcttaaccggtgatgaagtatggatgttgcttttagatagagggatactgccttttggtgtggacgttgaagaaatgagtatacaatacggacaagctatgtttgaatgcggcataaaaacaggcggaaaacaacaaggaaatgcttgtggagctgcaaattcgcgtagtggctgttggacttgccttatgatgaatggtgaggataaaatgctaacccaactaataagcgaaggatatacagattatgcttatctacaatcatggaaaagcttcttacgctccattagaaacgatattcgttatcggaatgtaatgaataggcgaagtctgcaaacactccttaaaaacgaaaataaaggggattcggacttgttttcaattcaaaatcatgctgaatatgattatattatgtttgatcgcacagaaaaaggagactatgcaccaggagggcttacggtagaaggtagaagaatgcttttagagtatctactttttacacaacaaaagatgaatacaaatcttatttctgaagaagaaattgaggcagtgctgcaagcctggtatgaaacggatggaattagagtataccgagatgaattggaacctatacaccacgcatatctaggtgaattggtgttcaaacccgattgtacaataaatgaggaaaaaacaacgtctccatttcccgtattttttgtagaaatagatattcatctagggaagcaggaactatttcgttggattaaagagcggcaaagaattacacaacaaagctttttcttctttccttcaaattattcaaatgaagttgcaaagttaacatggaacaagctaacctttgttgtatctagagtagatgtaacagaagcaagagacgctgaacgaattgttcgtcattggttaggaatggatatgtaccatggaaagaagaacgaacaacataaacaaatgctaattcagctattaattcaatccatgaagaatgaacaattgtttaaagaagatgaaaaagctagtacgaagcttttgtatgctgcagagtttacaaatagactgtctagattaatagaaacagaggaaatactatccgaagagacaaaccatctctttgcaaaagtacttaaggaattaggaaacgaggcatttctaatagattaataaatattagaaaaataaattaataaaagacgtgttctataaatagaatacgtctttttattttagtgtgattaatacattcaaggtaagctcatttttgatatattatgtgttatgtattgtattaggaatctttttcttgattctcattttcaatattttttaatgctacatgtttggatttatttttgaaatctaaataactaatataagagagtagttcctcttcgaataatagaatatcttcgcattttccgtacaatttatgagccaactgtgtaacaactgctttttcatgttccacgttatctaaaacctgatgattaaacaagtaatctgtactaaccaaaaaatagattgcaattttttttaccatatcaaagtttggctctttatttcctaactcccaggaagatattgcacttcctgttacccctaactcgatacctaatttgtgtagactaattccttttaatgttcttaaattcctaaggttctgcccaaaaatatttcctttcaatcaaatcaacctttcaaatttttaattgacaattagtatagagttgaaataaagttactatattttaaaaaaagtattcatcaaactttattctaagtctacttacaggtcactgtaaatattgataatatctttttaaagatattttagttttgaaccccatcctacttaccaaatctttttcagttactccttgcttaataagacggagaataaaagtgttcctcatctgctgcgcagaaatacgcctttttagtcccgctcgtttcacttcaagtcgtatcatcttttgtatagcaacttcagacaaagcttttggcatatccttttcgtatacccaacgatacgtacctcgattaaaatcaaatgccacaaatagaggattatctgtgtgttgtctaggtcttactggttccggaatagtcttgtaatatttataaagctgctgcgtatcttccatagttaaaaagacagacctagttgctccattctccccaggtaccattaagatatttctagcaaactttatatggctcatattaagcgatacaagctcatgcaaggacaacccatagtttactactaaatttataatacaaacgtttctatccataataagagggcgatatttagcttgtctttccgttaagcccttcgttgatagaacagtttgttttaaaagcttttcttccatttcagtaataaaatcattatcatttagtgattgatccggaattaaagagaaattaataccatccaatggactaactatacctaaaaacatgtgtaccttcttcaaaaccacccatattctgtgtcttgttttctgagaatatttacgcttgtcttctaactcagagaaatacgtctgatagtccgcttcagaaagttcacgccatgatttgatatgtagaagtttctcattttctcttagccacttataaaaatctttaatatcgtaagcataacgtttaatcgtggattgttttcgtcctttttctgttaaataagcagaaaaggctgctaatgtttcttctaaattaatgtttttgctcattataatcacctaatttcttaggaattattataacagaaaataagtgaaagacctgctaccgccctttgctacgcacggttgctgccatctccaaaacgcaaacggacaaacaaccctttgcgttttggagatgttgattattatctataaagtaaaataaacagggttatcataatactccaaaaaggaactacaaaaactaatccccaaaatattcctttgaaaaatctaatctcgttataggtatctatatctaagtaagtcgtatctttaagtacagtcatgtttaatcctccaaatatgaattgtttactaaaatgaaaaaaggacaaacctcgccctggtagggatacgtaggtttgtcctttagtatgtgggtaatgatatgtttattttccattattataacgtaatttacaaatattttcaatttggtcagacatcttattaacaatcatactagctgtattaaaaatctattataaatatatatcttatatattaaaaagaaataaagataaaactattataggtatcaaaaataggggaaagatctactcccacaagggaaaatttgatgttagaacgtaaaaaatcataaatagtagaaaatgtatacggaaattcaatgattattagactatcaattctacaaaaaagcataaagagaattatatatttctacatgaaatcggaaagaaattgatacaaatcactttatatttatccaactatggaaataggctttattttctttattttgttaaatacagcagtatctagcgttcaattacccacattttatccagattaagcttctaattgttaacattactcagtatatacacataactcacattattattgatgatttttattagataaatacaacgacactagtagttacaatgatatcaggaaaatattattcacattcaagtatatttttcctcatatccactatttttattatttttcttctgattttttgtaggtattatgagataggttttactactttaaaagaatactccctagcactatgtggagagttctataatgctagaagagaatttgtatagaagtgcataaaaaaagacctcattttacatgaagtccttctgattttgtatttataaatagagtagtagaaaaggagtatgaatgaaacaactacgaatagccctctaatttcgattttttcaaaaatagagagctcgttactattattttgtttccattgcgtgtagcacctgatctggagctgttattgttacatcggcacgtactaaacgttcgaaggtacgcataaactctagtaaattaaactgctttggtagctcaataacgcgaagtttttcttgtggcagcttatcaattgcctcgataaaccattcacgaacatcacttggaatcgtgcgttctttatggccacgaacttttagtttttcacgcatttcaatttctaaagcgatatatgcatggagattcactccctgatcatatgcatattttctaaataacgtttcttcctggtattttagataattacggtgataagactcttccgtcactggtaccgcaaacttctgcttcagtagtgcatgcacattcttaaacatcttcttaatgttgtgaagagagtacatagaataatgtaaaccgaaattaaagacagcttgctcacggtcactatttctctcttttggtatatgctgcgcaataagagggtagataccttcttttgctgctgtatcgagaatttgatattgagatgtttgatgcaataatttcttcaatgtatatacaattttcgttggatatccttcttttcgatcaaccatgtcacgtagtccgcgaatgacactgcgaatttgacggtgacaagtatgctttaagacatgaatgaatttattcatgtctgcagacagttcaccgatattcatctcttgtaggactgcttcgataaatttcgcttttcgagcataggtagcttttggtgtaaatggatccctatgttgttcttctccagcttctttcgaacataagaagtctgaatggatagacagatataatgtcgtatatcgttttgtatgctttacacctttttgcattttacaaattttgaataggggattccctgtacatggtaatgcagttgttaattcctcgataaccgcacggatttgatgcggatattttttatgtaagaaacaatacatcccaccgaagtgagttttgtttcctctttcatcctgcttatccaaagaacgctttaatgttgtttccgtatgttgttgcatcgcaatgtctaagaatagtttcttagctgctacagatagtttaaagaaagcctttgtaaatacaacaggactaatatatacgtatggatttgctttttctgtttcctcgtttataaaatgagtcagtttgattgtatatcggccatctaagccattttcaatagatataatgttatgtaagcttaactttttcaaagcgatatagaattgagaatgctgaatgtatgcaagctcttctttatattgcttgtaatcttcccacatcatatgtattgttacatttggaatgacaccatttgtatagcattttttatgtaagtacaagaatacttcaagatctgcattcgtaataccgtataatttatgttttcttccggttttttctgcaattgcagacattgcgcgacgtgaaaaagatggcttggctttttcgacaaagccttctacgtcagcaatacgttcttcgtatgtcatgtgctgcagaatatcttctaaatatgtatctttatagctgtagtatttctcctcaaatgtttccacaaacttttgccaagatttgagtgttactagcacagcattggttgtttccccatttaagctacgttgatttcgtattacaaatgatttccccatctttttcacctccgttctgcaaattcagaaatatatgccaaaagactataaaatattccaattttgattatatcaaaacgaattttgtaaaaacgtgccctttaagagagtttttaaaaagaggaaacacacgctaaccccttgagccacaaggcctcaaaaaaaagttacaaaaaattttatgtgcaacttttgtgaaaatgtgtttcctgtttcggtgctagaggaaacatggaaatcacaataaaccttgatttaatcatattttttactcattgttctttagttacgcgcacgacttgagaaaaatgtttcctgttttccgtttttttacgcgcgcgacttgggaaaaaaatagagtttatttatgttttgaaaaaacgaagatactatagaactattggtataaaaggttttttggcatgtttataaaaaagttacgcgcacgacttgggaaaagtgtttcttgttttgtgttttaagaaggaatatgtttccaaaaagtagtgtattttgttgcaggtgtttcctcttttttcgttatacgcgtaacttgggaaaagtgtttcctctgaaaaagaagaaacaatacaaattgaatctgaaaaattagcaaggtatgattaaatatacaggagaaaatattaagagaaatttttttaaaacatttataaggggaattgagaatggatcaaagaatagaagaagttaattataaactaatagacaatggtatatttttcagtgtgaataagactcaacttgcacgacactttctaaataatgttcttgaaatcgatgtatgtaatctaaacaaagaagaagttactaaaataatttgtgagaaatatggttataaattaaaacagttaccagatgaagaagaaatctatctatttgtagctcataacataatgggaattaaagaggataaagagccttatgaatgttttaaccatgaggtttttcttgtaatgaaggatttaagaaaaattaattttatgatccaagaatatgaatcaaaacagcaagttaaagatattgatagatatgaaaagaaaaagtatcaatacttagctgaaaagctttataaggcgaaagatgtgatatgtgaatatatgacaggagaaatcaattcatgtatatataaagaagtaaaagattggagtaaaccaaatggatttcctagctccggtagttttaatcaaatgttaccgagtcgatatgcttttagaggtagggaagaagaatatgaaatgtcagtttttgatggattgaattataaatttgaatttattacgttacaagagcgaaatgaattgaaacttctacacagtaataataaagatgaatttaatgaacgtgtggatagatatataattacacatgaaattgacaataaaatattatctcttatagaggaaaatcatgtacttaataagagaggaatgcttaaacaagcaatagaaatttataaagaagatatgatggaattattctgccagattatacctcttcaaattgaggggataatatatgattattgtattgagttaggggtttcttcagcaaatatagaacgtacctctttggatagaaaaatagaagagatagtaaaaaaagatagacggttcaaatgtcatgaatattttaagtatgattttattgagttaagaaatacagcagcgcatggaaggttgcacgagaatgttaatttcaaagatactgcaaatatgttaattttagatttaatgtatttatgtgatgctttaaataattctaatgcgctagtggttaacagaatgagaagccttataaagaggtttgaagaaaactttaataatgattatgtacctatagacgggatagtatactcgtttatagcaaaatacagagataagtcccttccatctatttatgagaaggaaaatgtaatacaagaaataaaaaaatatgctatgagcgataattttttgagatatatacatattcacataatgcatccttcgttggtatcagaattatcaccggaacagaaacaagaaataaaaaaaattatagtttatttaatgcgttcaaaagaaattaaagagcgatgtgtaaatttattgaaattattagcagataattcaaaagaagaattagtacataaataagtatgcgcaccatattaggtgaataggaggagaatatggatcagttaaaacaattgtttcaaagtacattattagtggcatacccactatttcaaaatatagaaaataacgaacgaatctttaataaatggagaggactttgtacgttaattaatagcgatgttagttatttagaggatcctatgtacacatctgtctcctttaaaaaatttgcaaattggatatcgtataaggaatcccaaggtgttggtattatggaaattgttgctcaaatagaaggataccgaccagaagtatttgaattacttgctaatgatatagaaaaagaatttgaaattcttttagtgaaacaaaaacaagaaaaaaaacatacagaggagcagcagagcttcatcgaacatagtagtgctggttttatgtaccatttaacagacacaattgcaaaaaataattttacagaagataaggaattgaatgcccatattgctgagctaccagataagagtaatagccttgttgtggtatcttcacgttttaatgatggtgatatgaaattaagaggcgcaggggagttaaatagatggaatacattagttgattctacttttgttgatcgtgtaatggatgatttaactgctgattgcttggatattgtaacagaaatatgggtgaagtcagcaagcacggaaagtagtccagtacatataggttacgaagaaatattagaaatgtgtagtatgaagcaggtgagaaatggtaagtcctattatcgtaaagaggaccgtttaaagattatggagcgtttagctgcactggcaagtatttttatatatgtaaacgaagataatgaaatagttatactaaatgatgatgagaatccaaatgagtcacttgcttataaaaagcaacgagtacgaagactattcgtaatggatgaaatagtatttgctaaagatattgataccgatgaaatgttaggtattgaaagtatgaatgttgcacctggaacatttttatctaagtatttatatggatcagaaaaattgactggtttgttatcgaaaaaggcccttgaatacaacagtaaacaacagcgatatcataaaagattgactaggtatttaagttggagatggcgaattcagcaagcttatcagcatttagtacacccttattcaatcggtggtccaaaaggtcttataagtgttatgggtgtaagcatgaatcaaaatcctgccagaataagaagtgtattcgaaaagacacttgatgacttaatgcgtgatgaagtcatcaaggaatggcaataccaaacaccgattgatgaggggaaatgttctgggcgtaactggcttgagaattattggttaaaccttaaagtaacggttacacctactgatgagttagtatcgttacagcaagagcttttacaaaagaaaaaaataactcctaagaataaattgatggaaacagtggtaaaagatccagtaatagaagtacaggatatggagatagaagaaattcaaacatctcaattagaacagcaacaggtaaatagggatattaattggtatcagcagaagattctccaatataaagaagaaaataagtgtagtttaagagatatggcaaaagaaatagagatatcaccatctaatctttcaaaattgttaataggcaaaagaaaaagattaagcgaagaaacacataataagttagataaatggattgagcgtcaagaggtagttaatctgctgtaaattatggttaaatataaatcaaaaaaagctgttggaaacaaacgaaaagtgtatgtttccaatagctttttttgattatacagttacacggattaaaaatagtatctttattaaaatcataatgcatttataaattcgtcaaatataattttcacctctttcttaacagaatcaaacacctgttataaagttgttaaaaaaatgcaaggtttattcaacaattgggcgagagaatatgggagttacataccttttaagtagattctgatctacctgtttaaaactaaaagtttcgagtaaagatatggttagttgttgtgtaaataaatggatatttaaatacaaatgaatatatattttatatttgataaacaaattaatttaattagtattttccttaataatagaatcaattgtactttgttttattacccctgatttttctgatttaagatgacaaaaatttttcaaagaaaaattaatattctccaatgcttttatcaaatcagatattttacttgattccttactaaacaattcttctaaaaaattttttttaaaaggcatccaaattaaaaagacagacataaaaattaaaaaacctaacattaatagatactgaatagcttctgctgatgtcttaatttcatgattataaacccagctattgaaagctgaccatactggaatcgtaaacaagaaaaataaagaaccatagctagacaaaagttttaatacatttaatttctcggtttcttcttttttttcctttaacacctgtattaaaaattgtaatgactcttcattgaatttaggatcattatttaaaagttctttcttaaataaatatgattgaacaattaaacaaataaaaacttgccattgtttgcttttaaacgagatattatatttattaacagaaatcaaaatagctggttttactacaacataatgcatacataccaaaaacaaaatcatataaacaaaaaagaaaatcatataaatatagaaagaatcaaattcaatatcatgttcgacaaagatgtttaaagaaataataactaaagcggctattgaaataaaagtagcaaccaaaaaaataatattttttaaaacatacttataaactaaattccatttacttaactttttcgaataaaaattaaataactccaattcaaaatcaaacatataattctccttactattaataattataccttttaataacattatcaccagttctactatcgatgtaaaaaatatagcaattaccatacccacttaaaaaacaatttaatatacaagaccttttgaatttttacgctgttcaaattcaaaaataaccatcggaaatctatgaaatattaaacctattttgaggataaattattcgaactgaatacatattaatgttatattagaataacataataaaaataacataaaataataaattcatgtacaaaactataaattaaaaaaattgataggatatatttctaaaacatataaagcacctaattaatctgttacctaaattctttaggggacaggtggtttgatttttcttgaattcgcacacaattttaggaatggatgtatactagtaccatctttcgcacagttttgtttggttttttgttatcttttgtgagtagaaaacttcactttttaaatgaccaaagcagcttgctataaaggcattatcatggcaatttcctctccggaatatactgataattatgtcgttttctttggcatacgcttgaaacttcttgctgtataaatacttccttgattcgattgtagaaggacatttttacttttgccctcttattgcttgttttgatgtcttcactgctaatgccagtgtttataattgcttgatgacttaactaataatttcacgattaaaggtatccataatcgttgataactaaaaggttacgctcaccaaataatagattagacatatccgtaaactatgtttcattttgtatggatgaatcgaattgacattccaatcgatgagggtctatccctggttccacaccattgatgtatttctttttttggcacacttttgaaagaatataattttgtctcataagtcttaatactttttatgattcacaaagccgaagagtaggagtcactcttcgatattcatatcgtaatttatgcctaagacagatgtcctagattttcttttttaccttatctataaaatattttgttcgttataaccaccgataaatgtggaacagggtaattctaatacgttacacaattcttttacagttatttttatgtttaaacagttccataaagtaacaacaaattccggtttcaactccttttaatttccagataatttccgtatataagtaattttgtttttaagtgtttattttctaagcgtatttgttccaattcatttaattcttttggcacttttctataagaatattgttttcctacagggcgactaaaacaatacgtttcaccttcacgatgccacttcatccaagttttaatctgtgcttaatttttaacttctaattgatccataatttctttgtttgtgtacctttgttttttcagctcgattgttttccagataatttcttctagataagattttctcattcccatacgaggtgttttttcatgtatctctattcggcttcactcatatcaaatacttaagtttttttaaaattcccgtagtctttttatattatatatctaaaaaattatatgatatttatccattaatattttttatgtaagaaaataatagggtatttaaaattctgtaaattataatttatagaattttggagtggttaatatagatttgtatacaaattagatactatttattcatttttaaatatgaaactgatattatcaagttttttacgcttatttggtatcttttttagatactagtgttataatggataacaaggagggaattaaatgaaaaaaatagtgggtgaaaacattaggatatacttagaggcgacaggacgaactcatcaatgggttatggataaaggcggaattccaaaggcgactttttataagctattaaaaggagagggcgatttaacaaaaggaatagaaaaaataaacgaattgtttggaataaaagatgatttttatttctataattcagaatttaaaccaccattaaaattagaagataaattaaaaagatctgatatacgaaattttgcagctgcaaattatgtagccgttgagggcgaagaaacagaattcaaaaatactttagatactttagacgatttcataagaatgattgaactattaaagccttataataatttaaatagaaatgattttatataatattttttatctaatacttaacattaaatatagcctataaatttttggagtatacaacgttgaattttatctacaaagggatgtgaagaagaatgataaatagcactaatatcagggaagttatagagcagaatcaaaaaatacttccttcaatattggtaaacgtagaaagtacaattgaaaagggaattcattttaaatataaaactatagaaagtatacgtaattatttaatgcagaaaacagaagtactacttttcccgagcaaatctttatcttatgggggaatggtgttatatcgaaatggctctttttatataaacataaatactttacaaccgaaaacatatgagaattttgtttgggcacatgaatactatcattttgaatttgaaaaggatcgaatcaaaaatgcggatgatgtaacttttgtgaataatccagtcctaaatgaaaatgagcgtagagcaaatctttttgctgcagagttgttaataaatgatgatgtattaaaaactttatttcaagaaataaaattaaattacgttaatgattctttggagaagaatgtaattaggttaattccagcttttgaattgccttataaaactatggtaattaaattagcacaagaaaacctgattagtatggaagatgcagagagaattattgatcatgattaccgccataatttaccacaagattttgatctttcaattttagaacctacaaaagcaattaagattgatggattaaataaattacttgaatcagaatccgttcaagaaaatatgcttgaatcagattttgaaagtattcaaaatctagcaaatcagcatttcaaacaactggaggctattcgaatggaaatttaaggaggaacaaataaatggaccaagtaaccaatacaccagagacgaaccaagattcaaaatgcaatggaatagaaccttatttacaagatggtaggaaaaatgatagggttacacactattatatattggataataatgtcctatcagatttagcaaagttggcaagagaagagcaaagttccttcaaggagttaatgacatgttacaaaggaacagtatttatagtaccggaaatggtaatggaagaggctattaggaatttacctggacaacagtgggttgatgagaaatatttgaacttttatcaggtaatgagtgaattacatattcccatttatcttgaatctgttgagcataattatcagatttttgcagagggttatggtagtaaggaggaagccttccttcagtataaagagatagccctaaattcaataagtaatattgctattcaaggtgaactaagagaggcaaaatcatgtaaggatattgaaaaagcttattcgcagtccttgaaagatgctggcgaacgatttatttttctttatgcgcatgcgatgttacaagataaagtaaataagatttctattttgagtaatgagataaaaggtgtctacaatgtttggaaagcaaatatgagaaaaggtgaattattggaacttgtcagagttactagtcatgaggaatattgtgaaaaactgcgacctgtatcatataattgtattctagtgaattccttgaaaaagaatccaacattaactagtgaacagaaaaagtcattattacaaattatgagggacagtaagataattggtagaaatgtttattattctcagaaatcatgcaatttagtagatactagggcagatatgaacaatgaggaatttataaactttattgaaaaacatgatgattataaattagcgttttaaattatgcaagttttgaagtgttctatacttttgtatgggacattttttggtttatctattttaaatagaagaatcttacttcgaaaataagaatggttccgttttaaactatgtatttggggaagatagggtgacctatattgctcatgttcgtgaaaataaaaattgagtataaactgcggaagtgctcttattaaaattagttaaattactacaagctttatttttaaataaaaatattcttaaaaaatgacttaactaaagtaatggttaggtctttttcgtatgcttattttataaataaataaggtttaattgagattagagtgaagattaatataaagttttggttttataaagtagagtagataatatataagtagaaggtaattggagagagggaaccaaattgtgtaaatgtagggtttgtgagacaaacaacaatgattttcattgcaatatagctggggataatatttgtagaaattgttgtaatgactttcaattaagaaactttaaagatagttggagtggtttagtaaagctagttaaggatgaaatggaaatttataacattagcgaatgttgcctaaaatgcaaggggttaatgagaaatcaaagggttgaattaacaggggacggatcgataataaattatggctacaatggcaaatatgtttttaatgatatggttgattcttactcgtataaatttttcaataagaaaaaaatagtattattagagtctatgaattcactagatataactggagtatatgatttggcggaaggatactatcttttagaagaatatgaaaaagcaatagatttattagaaaatttggaggggaaggacactgatagtaaagtgttgttactgctaggaaaggtgtattttcatgccaataacttacaagctgcaatagattgtttattaaattctataaaaatacatggggataattcagagacttatcgtatactgggagaggtatatcaagcagataataatcttataaatagtgcatattattttaatcaagcaatcaagtattttaaaatagacgcgtatgatagaccaaatgattattttccacagtattcatatcttggattagcagtagtatattctaagttgaatcagcataatgaagtaataaaatcagcggaaaaatttttagaatctcaatatagttgggataccttggtagaaatgctttatgagcaaagatccggtgaaaagaactatataggtttcggtggtttttttgcatgcgctactatatatgaattaatggcattgagttacttagagaaagagaatctaatgctagctgaaaaatatattgaccgtgctcaagaattaaatcctgaaaatacaaatattgcaacgaccaaagggataattataggtagaaagcataatgatgggaaaataagtgagtatagagagcaaattagttcattaagacagaatatagagttgagagctagtagtattaacaaactaaaaacgctaagaccagaagaacaagtcaaactgtttacgggaaatgaagaagaaagtgtgtggggtttcctggtagggaaaatatttgataatttaaagacaatcgagaatttatcaccaattgttacgccatctcagaataaagctgctgaagaggatagatatacggatttatttaaatcacatatggattctaatttagtagatacctttggttggattactcatactcagagtagaggtggatacacacggaaagagatgggagatagagggggaataggagaaagggatatagtaattcgttctcatcaaaataaagacttactaatgggtgaagctctaatattgaaagggaaagatactgcaagcataaaaacccatactaagaaaatttttggatatgatatagggaattgtaacttccacataattattaattggggttttagcgaaaagcctgattcagtctggaaagattatagaaaattagtaatttctcggcaagagggtatttatgcagtaattgaaaatggagaaacagagaatttatatccagggattaataaacaaggaataagaacattttacacgaaacattctacagatgttgagaatgaggttgctactgcgattcatgtgtacgttgatgtattaaaacaaatgaagcgtgaaggtgctgaattagcaaggaagaagtagaacgatgtgattagaagatttaataaataaaattcttcatcatattataaaactatacattcttgtttattagttagctaatagctatgaaaataaaattaaatatatcggtgtacaagaatgaattgatttagaaagtcctttgattttttaggtgcgaatgtatagcaaacatgaaattcctagtacattcgcacctagaattctcataatgtatgatggggatttatgatttttatacaaaatactttaataaataaaaatatttttatatttttgaatagaattaacgtatttgtgattgattttgagcacaaatcggtgtcgcacctcatataggtgcgtggattgaaatacaagatacgagaatttaatgacgtcacccacatgtcgcacctcatataggtgcgtggattgaaattattgttacacctttagagtatccgagtaaaaaagtcgcacctcatataggtgcgtggattgaaatacaatgggaaagtgttaggttatgcacgttttaaagtcgcacctcatataggtgcgtgaattgaaatgaagatagtagaagaaatcaaaaaaagtgtatgtcgcaccttaaataggtgtgtgaattgaaattttgttgctccagtcgttatgatcgtctttgcagtcgcactttatataggtgcgtggattgaaattaggagttattaatggctttagatgttagaccagtcgcaccttatataggtgtgaggattgaaattacctcgggtttatatttatctggaatgcccatagtcgcaccctatataggtgcgtggattgaaattttgcaactagctcaattgtttttccgttttcagtcgcacctcatataggtgcatggattgaaattacctcgggtttatatttatctggaacgctcatagtcgcaccttaaataggtgtgtggattgaaatataatatcacaattttgacaaaattcagtcatgattgcacctcatataggtgcttggattgaaatagtttagtagatactcaactagaagtatctatatctgcagtatctaatacaaaagtaaacagtataaaatggagggagattgaatgacctacattgctcatatacgcgagagtgacagtcaagtacaaacagtcgaagagcatttattaagagtaaaagaactagctgaaacctatggagaaaaaattggtataaaacatttagctggtttagccggtatgctccatgatatggggaaatacaccaatgagtttaaagaatatatattggaagcagtaaataatcctaattctccacctaaaaaggggagtgttgaccattcaactgcaggggggaaattgttatatcaattattccatacagaaaatatgattccttacaaagggataatatctgagatagtgggaaatgctattatttctcaccacggataccttcaagattttttaaatccagatttagaatcgccctatttaaatagagtgcgagataagcaattaagaggatttgatgttacacaacaattcttttttaaacatgtcatgaaagagaaagattttcatgagtatgtggacaaagctactgtagaactagaaagtttcctacttaaagaatccccagaaaatgctgaaaaacaattaatgtttttaactaaattcatctttagtacattaattgatgccgatagaacaaacacccgattatttgaagaagaaaaaagtgtagaatccgtaataaatgttgatgagttatttgagaaatactacgagagactcatgacaaaaatcaattctttcaaaaaacagcagaatgcaaatacccctattaacatgttgagagcagacatgtcagatcagtgtgatcagttcgctgagaggccatcaggaatatatacgttatctattccaactggtggtggtaaaacattagcaagcttaaggtatgcactaaaacatgcaaacacccataataaaaaacgaattatttatgttgtaccttttacaacaattatcgagcaaaatgcggaagaggttcgaagaatattagaggatgaagaaaatattttagaacatcattcaaatatagttgaagaagtgaatgagcatgatgaaaatgaagacggtgtggttagcatacaacaaaaattaaaattagctaaagataattgggattctcctattatttttacaaccatggttcagtttctaaatgtgttttacgcaaagggaaatagaaatactagaagactccataatttaagtgaggcaattattatttttgatgaagtgcaaaaagttcctgtttcatgtgtttcattatttaatcaagcattgaattttttaaaaatatatactcgttccagtatagtcctctgcactgctactcaacctgctttggactttgtagaacaaaaattagacataaatacggatgctgaaatgattaataaccttgatcatgtaattgaagcatttaaaagggtgaaaatcattgatcaagcaactaatgaaatctttaataaagataaactcaaaacatttatacatacaaaaatagaggaagtacaaagtatcctcattgttctaaatacaaaatcagttgtgagagatttatatacacaattacagagtcaaggattaaatatccctatttatcatttaagcacaacaatgtgtgcagcacatcgacataaaattttagaagaagttagagaatgtctcaaagaaggaagaaaaatcatttgcatcagcacacagttaatcgaagcaggtgtagatgtgagttttgagtgtgttgttcgttctttatcagggttagattatatagcacaagctgcaggaagatgtaatcgccacggggaaaagggcatacagaatgtctatgtgattgattatgaagaggaaaacttaagtcatttaaaggaaattaaaattggaaagaaaattacgaagaaaatccttatggatttaaaacataacgataaaatacatggaggacatattttatcaagagaggcaatgaagaggtattttaaagaatattatagagaatttgaatcagatttagattactttattccaaaactaaaaaagaacatgactgagttattatccgtaccaagaatagaaaatagctatcgtcgagcatatattcataaacatgataaaaaagatattccattatttattataaatagctaccagacagcggccaaacattttaacgtcattgatgatataaccacttcagttattgtcccatatgaagaaggaaaggatattatcgcagaattaaatagcaataattccattgaggatctgactcgattattacgaaaggcacagcagtatacagttaacgtattcaactatgaaaaagaaaaattgataataaatgatggactcgtatactatcttgatgggaaaattctagccttgaaggaaagtgcttaatgagagcgattttaagacagctatattttaaactctatctttgtttgagatagggtttttaatcgatgtttttataccacatcaaaagaattcttaaatttcatataatatataatcgccaaatattgatatagttacataggaggagtatcattaatttactagaaaaatatagaaaatgaaaatgaaaaaggaggaagaatctttgcggaattctattgaatttgaggtttttggtgattacgcacttttcacagatcctttgatgaaaatgggaggagaaaagttaacttaccaagtaccaacttatcaagctatcaaagggattgttgaatcaatctactggaagccaactcttcttatgattgtagataaaataagaattatgaatgcaatcaaaatggaatcaaaaggtattcgtccaattgaatatggtggtggaaatacactcgcaaattacacatatttaaagaatgtaagataccaagttcaggctcattttatctttaatcatcatcgacctgatttagcttttgatcgtaatgaatataagcatcataacatcctaaaacgttcacttaaagttggaggacggcgagacatttttttaggaacgagagaatgccaaggatatgtggagccttgtgtttttggcgaaggagaaggcttttacgataattatggtggagatattcatttaggcacaatggttcatgggcttaattatcctgatgaaacaggtaggaatgaattagaagttcgattatggaatccggtaatgagagatggaattattcaattcatccgaccagaagaatgtacaaaaatccgtaaaatatccaagatggatccaaagatttttgacagttcaaacgttgaatcagttgatgagcttataaaacaattagaagaaggaggtgaataaatgagttggctattgaatttgtatgagacctatcaatcaaatttagatcgagtcggtaaaattgaaaaaaaatataatggccaagaatatacattgctacctatttcccacactactcagtcagcaaatattgaagttttaattacagaagaaggggagttccattcagcaacagtcatagataagagcgacgccaatacattgatcccttgtacagaagactctgcaagtaggtctggtaccggagcgtataaagttcctcatccattacatgataaattaacttacgttgcaggtgattttggtgaatacggcggcagtaaaaaagaagaggagtcatttggctattatatcgaacacctaaggaattgggtagaatccccatattctacagataaattaaaaagcatttacaaatacttaagaaaaaaacaattagtgaaagacttggtagaaaccaaaatattatggcttgatgaaaaccaaaagctgattggaaaatgggataaaaaagttgaagtttttctggggaacaagcccgaaatctttacagtgcttccagctggccaagaagccgcgtttgttagatttaccgtgtattctccaaataagatgctatcaaaggtatggcaagacaaagaaatacataactcctttattaatttctatgatggcctcctagataatgaagattactgctatgttacaggggaaataaaaccgagtactgataaacatgcgaaaaagattagaaatgccagtgatcaagcaaagttaatctcttcaaatgatttaagaggtttcacatttagaggaagatttactacgtcaaatgaagtagcgaatattagctatgatgtgtcccaaaaagcacataatgcattgaaatggcttattaacaagcaaggaaaaattatcgatcaacgtgtatttcttgtatggggcaatgatgcagaagatgttccagatattgtagaggatagttacagtatattttctatggatataagaggaactaaaaagcgagaaataaaatcctatacacatgaacaatttgccaatgaagttgctaaggcaattgatggttataaaaataatttatcttccagtgaaaatgtaaatattctcttgcttgattcagcgacaacaggtagattagcggttctttactatcgtaatatggataaaaacctttatttaaataggttgaagaactggcattctacatgtgtctgggagcatggttaccgtaaaaatgcagataatgaatttgttaaattttatgggacaccgtcaaccagagatattgcatttgctgcttatgggccaaaagcaaacgaaaaagtagtcaagagtttgatggagcgtatgcttccttgcatcatagatgagagaaaaatccctttcgacattgttagaagtgcctttcagcgtgcatcaaaccctctatcaatggaaaaatgggaatgggaaaaaacattaagtattacatgtgcattaattaataaaatggagggatatcaattggtattagataaggaaaataataatagagattatctcttcggacgccttctagcggttgcggatgttttggaaagaaaggcattaaataatggtgaccaacgtgctacaaatgctaggagatatatgaattccttttcacaacatccggaaagaacatggaggaccattcaaggggccctacaaccgtatcaagcacgtttaggggagaaagtttggtattataacaaattaattgatgagattggctcaatgataaaaattgaagattttaataataaaccactgtctggaaaatacttgttaggcttttatagtcaacggcatgaattgtatcaaaaaaaagaaaaaaatgtttcactaaatgatgtagtaaatattggagaggagaattaaaaatgaaaactttagatcacaaaatcgattttgcagttgttctatcagttacaaaagctaatccaaatggagatcctttgaatggaaatcgcccaagacaaaattatgatggacatggtgaaatctctgatgtagccattaaacgaaagattagaaatcgtctgcaagacatggaagaatctatttttgttcaatcaaatgacaggaaggtagaccaatttaatagtttaagggaacgagcagaaaccaatgtagatttagtcaaagcgttaaaatcgaaggataatccacatgaacaatttgctgcaattgcatgtaaagagtggattgatgtaagaagctttggacaagtttttgcctttaaagggggagctggaaaaggtgtctctgttggagtaagaggacctgtttcaattcatacggcaacgagtgttgatccgattgatattactagtatgcagattacgaaaagtgtaaattctgatcttggtaaggataaaggtgctgatacgatgagtatgaagtatcgtgctgattttggagtatatgtcttttatggaagtattaatacatagttagcaaaaaagacaggttttactaacgaagatgcggagaagattaaaaatgcactggttacattgtttgaaaatgatgcatcagcagcacgccctgaaggaagtatagaagtacataaagtttgttggtgggatcataattcaaaacttggtcaatactcatctgcaaaagtacatcgtttattagaggttaaacggaatattgacgagccaaaaacaatcgatgattatactgtattggtacatgaattagatgatttaaaagttgagattattaatggaatgtaataaaaagcgtcagaatagttgaaagaaagtattcttataaagatatactctatcaatttattaaatgaaagtcgcatctcttgcaggtgcgtggattgaaatgacactatgagaaacatcgattcaaacggtatcgtcgcacctcatgtaggtgcgtggattgaaataggatatggaagaatcaatttttgttcaatcgaagtcgcaccttatataggtgcgtagattaagactggtaagataattgatagtaatttagtgtctctgttggagtaagaggatctacttcaattcatacgacaactagtgttaatccgattgacattactagtatgcagattacgaaaagtgtaatgtctgagcctgggaaagataaaggttcagatacgatggggatgaagcatggtgttgatcttggagcttatatattttatggaagtattcatatgcaatgagcaaggaagacagattttaccaaaggtgatgcggaaaagattaaaaatgaactggttacattgtttggaaatgatgggtcagcagcacgccctgaaggaagtatagaagtacataaagtttgttggtggaaacataattcaaaacttggccagtactcttccgcaaaagtacaccgtttactggatattaagcggaacattgacgaaccaaaaataattgatgactataacattttggtaaaagaattagatattttaaaagtggctattattgatggactgtaatgaagaaaacgttagaataattgaaggaaagcgtatttattaaaaagttaatcaaccatttattaaagaaaagtcgtacctcttgtaggtacgtggattgaaatcattggcggtagttcataagtaacaacaaatggatgtcgcacctctagtaggtgcgtggattgaaatatgatattcaaagagcctgaacaagtggaatcgagtcgcaccttatataggtgcgtggattgaaatataattgaatatgagctgccgccgatggaagggacgtcgcaccttatataggtgtgtagattgaaatatggaaatggaacgttcttacggatcaaaagaagtcgcaccttatatgggtgcgtggattgaaatatgtagctggtattaatgctttgtgaaaaacaagtcgcaccttatataggtgcatggattgaaattaaattacttgctgccttatctagattactttcgtcgcatctcttgtaggtgtatggagtaagactgataagataattgatagtaatttagtgtttttgttggagtaaggggacctacttcaattcatacggcaactagtgttgatccgattgatattactagtatgcagattacgaaaagtgtaaattctgatcttggtaaggataaaggtgctgatacgatgagtatgaagtatcgtgctgattttggagtatatgtcttttatggaagtattaatacatagttagcaaaaaagacaggttttactaacgaagatgcggagaagattaaaaatgcactggttacattgtttgaaaatgatgcatcagcagcacgccctgaaggaagtatagaagtgcataaagtttgttggtgggatcataattcaaaacttggtcaatactcctctgcaaaagtacaccgtttattagaggttaaacggaatattgacgaaccaaaaacaattgatgattatactgtattggtacatgaattagatggtttaaaagttgagattattgatggaatgtaataaaaagcgtcagaatagttgaacgaaagtatccttataaagatatactctatcaatttattaaaggaaagtcgcatctcttgcaggtgcgtggattgaaataaagaccatttgaccgagaatgatagaagcagggatgtcgcaccttaaataggtgcgtggattgaaattggttattttccattcgtgttttatgctcctctgtcgcaccttatataggtgcatggattgaaattttaagtcgtatacaacagtaacacacaaagaatatcgcacctcttgtaggtgtgtggagtaaggctgataagataattgatagtaatttagtgtctctgttggagtaagagaacctgtttcaattcatacagcaacaagtgttgatccgattgatattacttgtatgcagattaagaaaagtgtaaattctgagcttgggaaggataaaggttcagatacaacggggataaagcatcgtgttgattttggagtctatgtttttttatggaagtattaatacacagttagcagaaaagacaggttttactaacgaagatgcggagatgatgaaaaatgcactggttccattgattgaaaatgatgcatcagcagcacgccctgaaggaattatagaagtacatagagtttgttggtgggatcatatagttcaaaacttggtcaatactcctctgcaaaaatacatcgtttattagaggttaaacggaatattgacgagccaaaaacaatcgatgattatactgtactggtacatgaattagatgatttaatagttgagattattaatgggatgtaataaaaagcgtcagaatagttgatagagtatcttcttataaggagatactctatcaatttattaaaggaaagtcacatctcttgcaggtgcgcggattgaaatttttaaagccagccttccaacccaaaaagttagtgtcgcacctcttatagttacgtgaattgaaattgctagtgctaaacgtctaaaggaattgtatgggccgtcacacctctagtaggtgtttggattgaaagtggtaagacacttgatagtattttattaagtctaacgcattaaataccttttgattaacgttcttcacaatcttgagaaagaaggagtcttttggtaatgcgttaactttaattaaaatttcttgaaatatataacgatattatataatatataggtatattgttagtttaattgattccgtttattcccacaccttattgtgttgtggttgagttgtagaagcaagttgcgtcttgtttcaattttgaaagggcttctttgagccgattagtgtatatatagcttattttgctatacacattattaatcgacttgaagaagctctttttgtgttgttttcaagttcgcaggcggggccatgtatcaaaatatagcaaattaaacagttaggggagataaaacaaaatgaaaaaagattgtagacacttacgactagtaccaacagtagaggagcataaaacacgaatagaggcaaatgagacatatcaacagaagtcatatgctacatctacaatgtcatctgaaacaagaggaagattaaatcaaatgcgaggttgtttcgaggctgaaattatattaccagttggtaaatttcaatactttaaaccacatgctatgaatgaaaaagaagccattcaagaaatcgcattatttattgaagggatacaggaaatgaacataggctatgttatcttatggcgctttgttgggcaacaaagtttttatagtggtactaagatcgtagccgaaccaaagtttcgtaaaatcatgcgtaagttgaaagattatctttttgactacgaagaacttatttatgaaacagaaaagtaagaaggatagagggatatagatatgaaaaaagataagatttggacagtattagatgatccaaaagagcaggaaacaaaagagcaatcccaagagccggatgatatttttgctggtatggaagagctatcggagattacagatgatgaactaccattttaagcaagtcgaggtagtttatagagggtaaaaggaagaactaagtgatgtatatacttggatcttcctttttttattgcaaaaagaactttggagggaaatatataatgcgcataggtaacgatttagcggcgggatattatccaacaccactattagaagggaaacacttaatacagttattacaaatggaaccagagcgagtttatgcttgctttgatccatgttgtggagaaggtacaattttacgaagttttgcagatgaggtgagacaggttagcatacaaattgatacatatggtgtggaagtagatgcaaatcgatatggaaaagcaaaagagcaattagatgaagtggtatgttcggactttgaaagtatgatgattagtcatgactactttccgcttatttttttaaatcctccttataatacggagcttcgtacagaaaatacaaaatcagagaaaatggagttcaacttcctaaagcgtgctcacctttatttacaagatggtgggattatggtgtatgtcattccatacgacaaatttgctagggacgatattagctattttatagcaaaacattatgaggaaataggattaatgcgttttggcgatgaaaatgaagaatttgagcaatttaagcaatgtgtttttattggccgtaagcgtgcagctacgaagaatgatacatatttcaatgatcgatttgctaatttttgcgaaaatatgtctgacctttctttcgtcaaaaaacatgtaaatacattagcagaaatggtaaatcgtaaggactgggctataccagaattgcgtcatcaaaacaaacttatttttacatcacgagtggattataaaagtgcttatgaaggagttgggaaatcggaaggtatctcgtcgttcaaaaagcgtttaaatagagggaatggttactcacttcaaggtgagaaaacagctgctgaaagagcgaaaatgccgattgcttccggacaattaggactattgctgataacaggtgtggcagacggcttactgggtgaaggagatacactccatgcggtccgtggatctgagaatgtgtattatgaaacttcatttgagccacttcaaaaaacaacgaaagaagttgttttacaaaaacgccgcgcgaaatttatcatcgcaacaccgaccggtgaagtcaaagaacttgtctaggaaaggaagaaggctatgtctgtactattaggaataggagcattatttatcgtatgggaatttagtaatcgtatgtttcgtattgctattgtacttacagtcatttgtttatgtgcttctcaattaggtgcaggtacatatttggaagtattagagcaattctcagcgttccaaggtgcaggtaatatgctacatgcggctgaacaatcattaccagagtggaaacagtttatagatttttagccaataaattgaatgagtaggacatgagacgtatcgaataagatgcgttttttattttaggagggaaacttatgatacaagaaataattcaacaagatacatttgaccaggaacaaacaccagcaatgttgcaattggagacagccgttgcctcacatacagctttttgttttgcaatggcagtaaatcgtcatcaacaaatccaatttgcagtactaggtgcgaatgacagtacattaaagtcattccgtgctgccatatcaatgggaactaatcgtttgtattttggagagggaaaaaaagaagaattacattacattttagataaaaaagtgaatgtaaactcaaaaggtcagtttgaatttattaacacacaaacagcaaataagaagaaggcaattattgcattttctagagaattagaagaaaagtatattgttgcaattgacgaagcgccagagaaacaagtaagggatttcctaatggctcctccgtatggtttaccgatcttagaagaatgggcgaggccaatttatgaggagatgctaacaagagatctattacaaccgttagaggtgtattttgataagaatgagttttcttctctaacgattgcgcaagtcttactaaaagaaacggattgtaaagagtttttatcagaaatgatacgctctgggaaatgtcaatttccgcaagaaggtacaggtgaaaaaatcaatgaaattaatgatttaaatgaatacctattggaatattcacctgacatgcttgataaggttacaaaattggatgagcccttacatcaaccgatgaaagatcaggcattatctcattttgatacatatcaaagaccattattccctgtacaagcacatgtagcaacaggtgtagcaaaagctttacaagtacaaaagggaatcatcttgcagggggaaatgagcacgggcagtgcggcacgttccgctataagtgtagcttaaacacgaaaagcgggggccaaatcttattaagattggttacaactctttaaacgatttacagggtgaaaattccctgtcatgactaatattccaattcaagtcatgtctatgagactcctacatgcgcctatcattccaatgtgataggggtctgaagctaggtgaagccgtccttgaagcgaactcgttaaacgtggatttagggcggtaggctttaaaaacattctatgatgagcgaaatcgaaccctcgtatgtacgctccgttactcattccccaatctaataacgagatatatgattgggtcttgcgtgaagatatttctctcttgcctgaggagaaattgcttatataggtctttccagagtttatataagattcatgagagttaggaatagtctactcatgaacaagtagcgtcggagtatagagggcatctaaggaatgtaaaagaagggctggtttaaagggaacgtgcgagagccaataagcggaggtattggagcctatgaaacttattggaagtcagcgacaccatagtacctatgatgaatagccgtttgtatcttgctataagttgcttctgcaacgaagtgtaggagaggagagaaactattctagggaagggtgttagtcgagaagtattgcactaattgaggaaatgttcaaacgaaccatgtgagagtaaaagagttaattcatttcggatagtccatttctctaatcaagggggcgatccatataaaaatgaaggataataaacaatttccacaaaacgaaaaagagctaaaactagcactcgatagcatgtaccgaatagccaaagaaagtagtaaacctttctataacctaattgaacttatgaagaacgagcagactatactgaccgccattcataatatcaagggtaataaaggaagcaaaactgctggcactgatggtaagactatggactactatcttcaaatgggcagagataagttgatgtctctaattcgtaggaacattaataactatcaacctagtccagtaagaagaaagtacattccaaaatcaaatggtaagcaacgtcctttgggtattcctaacatgatagaccgcatcatacaagaaatagccaaaattgtcattgaacccatagccgaagctaaattttatcattatagctttggtttcagaccaatgcgttcagctgagcaagctattgctgaaacacttgaacgtatcaggagaagcaaaacctattgggtaattgaaggcgatattaaagggtatttcgataacatcaatcacaataagttgattgaaataatgtggaaaataggaatccgagacaaaagagtgcttatgatgattaagaaaatgctaaaagcaggaattatggaagaaggaaaggtcagagataacgttagtggttcaccacaaggcggtatcatctcacctcttttggctaacatttatcttaattattttgattgggagattgctagaatgttccaagagcatccagctagatacaaggtcaaagacgtttctagaaatggactacaacgtgtccgacaaagacatgaagatacatttctaattcgatacgcagatgactgggttatcctttgtaaaagcgagggaaatgccaagcggattctcaaaaaagtggagaaatattttaaccaccaattgaaactggagctgtccaaagagaagaccttaatcactgatgtgagaacgaatagagtcaatttcttaggattctggatttttgcagaagaacatcggcttagaaaaggcaacatacaaggaaaagctatccctaacatggataaagccaagttgaaaataaaggagattaataaaaatattaaaaccctttatgaccatcgtggtaataaatccaaacaggttgccataatcgagagtatcaactcaaagattgttggcatagcaaattattataaaatcgccaatgtatctactatatttcaagggtttgacaaacgtattcattacgcccaatggagaacatggttgtttatgaacaatcgacgtggacgatattatcaactaaccactccagcggatactctcttaaatagaagagatagacacaaagagcaaaaaagtaaagtattcttcattgaagaacatggagctaaagtaggaatcaccaaatttgcatttacgccaaaacgtaatgcgatgaaagtgaatctcttaatgtcgccctatacagataatggccgaagtatttataaacggacaaccggcaaacgtgaggcactagaaagaccgaatttcttccaagaagagattcctttctaccaactcaacaaccgttatccgatatataactttgaattctatctgaatagagaatacgcatttaacagagataggggaaaatgtaactgttgtaaggttcagctaaatgaatggaatcttaacacacatcataaaaaccctaaactaccgcttaataaagtcaataaggtgataaatctggtttccttgtgcaaaacatgccacaagctggttcacaacgaaaatcccgttaccaatacaaaaggtggaaagaaaatagagcaacttagaaagttgcttaaagaggttaagtaagtacggctttcgaggataaattaactcttattcgtatttgaacaaattagtgtaatggcggttatagtcgtaatgctataacagtctttatggagaactgagacaacagtttgaaatatggtttcccgatggaacgccgtatgcggtgaaaatcgcacgtacggtgtggggcgggggaaaaggtggagattacttcaaagtcttacctatcgcacccgaaatgggtagtggctacctcaatccttacggattgagatgccacacataaagcgcaatgatgacagctgcagtagatggctattttcatttaaaagggaaaaaaggatatcgtacatgcgtatttgttccaccaactcttactgagaagtgggcaaaagaagaaatacgacacttattaccagacgcagagatacaccttattaaacgaactgaggatcttattcgtattcatcaagcttggattcaggccgggagaccaaaaccacaaaaaccaaccttctttgttattagttttacaacaatgcgaggagattctatcaaaatgatgccattatcttataagcagactcctctttctaaaaaatctgaggaagaggtgcaaagatattataagaatggctactactgttcggattgtggtgctaagttacgtaaaaaaacatcttctatcatggttcaacaggccaatggtgaacaaaaagaagtatgtcaatataaagattttacagctagtgacttagatactaaaacgaataaaaatagtgtatgtgctgattgtaattcaaatatttggagcccaaaagtaaaaacaaaatatgcaagttttaaagagtggacaaaatatgaggaacaattagtgcaggcaattaaagagggaaataaacctttacaaaaacaactagagttagagaatcgtgtaaaaccatatgacgcaaaacattcaggaagagcgtatagaaaagtagctgctgttgagtatattcgtagaaaaatgaagcatttctttgacgttcttattgctgatgagatacatgagctgaaaagtgaatctgcacaaggaactgctttaggaagtttagcaaaggtttgtaagaaagttgtagctggaacaggtacattatttggtggccgcgcaagcgatgtattctatacgttatggcgtttattccctcaaaaaatggttaaaagtggttttgaatacagttctttcatggaatggaatgaaacctacggaaacatcgagagaacatattaccatgatggtgaggtcacatctaatatagcttcacgcggagcacaaggtacattagataaaactaaggttgtacctggtatttcaccttatgtgtttactcaattcttaatggatacaaccattaatgtacgtcttaaagatgtatggccaaatcctgtggaactagtcaacgtccctacaattcttgttgatatgtctgaagagcagaagcaagcctatgagcatatgaaagagtcgtttgaaaaagcaattgaagcagcgaaaggtacaccagacgctgggaaactgtggctttcttatattcgtacaggtaatgcatatccagacaatatgatccattatccgaactattacttagatgatgcaggaaaagaactggtttggtctaatgataaattcaaatttgatgaggattgtatacagcctaaagagagagagttgcaaagtatattgcgtacagaaatttctgagggccgtccaaccatcgtatacgtatgtgatacaggatctacagtaaaagaacgagacgttcaaccacgtttacagaaggttgtagagcaaatatctggtgcgaaagtagctattctccgtaccaatacagttactccgccaaaacgtagtgaatggctaaaagatcaagtgaatagcggtgtgaatgtaattatttgctcgctagaattagtgaaggtgggtcttgatttacttgcaacacctacattgatattttatcaattaccatttagcttattcgcgttgaatcaggcagcaagaagacactgtcgtattggccaaactaagcaatgtaggaccttctatcttggataccgagaaacgttccaacagcagatggcgcaattaattgctcaaaagaataaagctgctgaagcaatgaacggtgaggttacaagtgatggtctgaatgcaatgcttggtgatactggagatctacagactctattaattcaaaacataaagagtggaaatcaattaaagggttcaacagaggaatggacaaaagcagcatctgatgaatcgaagcgggttcttgcaaatatcggtaatgtgattacacctgtgtttgaatcaattgaaattcaatttacgaactgggtgggaaaattaccaggaactatggatgttgcatttatgaaagaagttcaatttgtacaaagggctgttgaatgtattaaaaaagaacaagtacctggagttcgagtgaagaagaatgtacttgaaatagctggagaaatagaagatgtcattcgagctttaacaacactgaatactgataagcgtatgcttgtacaaaaacaagatatcacattctgggattcagttattgttgaagtggattcttctaaaaagaaaggaaaacgaaaaaacaaagtaattgatggacagtttgagttcgatttatttggataatcgagaggggaatattatgtttacaaaaatatttattggtctattttgttatgtgtttttggtagttcgtaattcaaagaaaaaatttctaatggaagaagccaagaaaaaagaaatggaaaataaaccggtggaacgccccgtttattggtgcccaagagaaaataaacctattggaagggaacaagagcgtgttactgttccaacaaaagagatcaccttagaaaaagatgtagcaagtatatatgatttagttgctacatctgttcataagaatctgggtgaggaagagagtgatagattaaaacatgaggatatagaagaagtggagtatgctgaagattttcatcatactcccactcctgaggctgtatatgatattccttttccaagtgatgaggatataccagtggaattattagaatatgaggacatgtatccacaacaagaatatgtttcaattccaccggaaacagaacacgttttttctgttcaacaaggagtagctgatgttgaagatatggattttgtgaggtggactgcaaaagtaatagaacaagaacaaggactgacacgtgtcataaatatgtctaataagaagcgttattggattcatacagagggagaaatattaccgaaaaatcaattactgtatatgaaattagaggtcaattcaccttattcttatacactagttgaatggagtaatagacaactagggaatatataaatctatttcctagttgtattttcttagttaaatagcatcaaatacagcattttctcactcatttgtacaagaataaaacatttttttatttttgtacaaatgagtgggacagaatgattcaccatataaggatattcgactataatgatacattgtacgtcattgtaatattgaaatgttttgagattcaagtgattaacagtcttaaaacaggagaattgagaactcttcgtaatattacaatgcttaaaatagattaaatccaaacatgaggattatatgaagtaaaaaatatttttgagttaaaaaaataacaattttgaaaggtgaatgtaaatgaatattaattccataagtaacaatgtagtagaaaaattagaacaaacggtgcgctatgaaaagaaacaagtccaggtattacgtgtaagtaaaagtagttctaatatacacgcttacatgatttttccggaattctcagaggttaaaatttcaaataccgaactggatgaatatatagaaaatctgtcaacaagcgtgaagtatgtcattgatcgcaagttgagtcaacaagaaattgaaaaacaaaatcattctttcattatgacgtgtgaagtcgaggaagatggtgtgatagatgatgaaacgattcattttaatacgacgtatgtaaaaccaccaacaattgcaaataaagtatttaagttggtatgtggattagggaatcgcttagatagcttaaaagaactacatattacagtgttaaataataatattaaccgaattgaaattgagttttacaatgaaaatgaaacatatgtggcagtagaaaaagaagaaattgcaaatgcaattatgggggcatatacaaaagcaaatatctattatgcagcagatctttattatgctgcagaaggaaatgaaattaaattaaagagcatcaaaccaaaattagcgggtgatgtgtgatgaaacgagaaaaaggaatgataggagtcttatgcacgcttgttttgatgattttattacttgtacccttagaagcagctcaagcttctgtaaaagtagattttaatgagttaaaaggaaatgatgtttcgtcatcatttaaagatggactaaacaatcgaatgaaaacaacagagaaagaagattcatttggatcatcaatcattcaaaagattgaaggattgtatgcgccggcttttaaagtaggagtcaatatcttttctatttcattcgtattaggagttattgtcatggttatggcattaattacaaagaatggtcaatggatgaagtgggcaaccggaagtatgattttctcatttatcagcatgatgtcgatgagactaagtgtatacttcttatttagttccgatgtattttcgtttatgaacatctttacggattttttagacctgtttaaagcaacagcacttattttcacaccatttatgttaatcgcaggtattcgtttaagaagaattcatgagagtacaaaacagccggaatattaccgttgggccaaccgtgtcataacgggatcttgtttgctgtgtatgttagccgtactcgctccatggctatttgctaatatgtaaagaactatatataaaaatagaaaaggtactgaatctacattcagtaccttttatctacccattaggttctttctttcatattcttcaaatacttcttctgatattggcgatagtatgccacttaaatacacagcggtatataaaaagtattggccatcatttgtttttattgtatgagtaccgtgttcctcattgtttggaataattcgttcaattttgagttgctttttatcacaaatgatctcttttactctatataaattatgtgttggtaaacgattaatatacaaacaaaggtattctagtagaaatagaataacagtcatttgtagaatgaaagcaatctttaatagagttggtatggatgcaaataatactagaaatatagagatcaagaaaatatttaactttgaaaaccatttttcatgttgatttaaagaaataatacttttcttattctgaaacacctggaacctcgttataagaaaaataattacaaagattccttcataactaaaccaggttttccactccgtatcagtaagttctagcaatatatatatgataccggtagatacgatcagtggtaccagctgtaccaaactaaatagtatggtatgttctaacattcttttcttgtagatacgattagtaattgaatccaagtttcttaactccttctgcaattttcatgatgacaccaccaataagaagatggtattcgccaatccctttttcatttacgtaccaacacatatagtgtcggataccttcttttgcactatggtcatgtaaaggaaaaggagatgcgtattttttagatgacatattattatcaccgaaaggtacctgttctgcaagtgcaaaacgtttcttcgaatcatttataatccaacaaccatagtttactgatccataccatattgcgtctttgtgaattggatcaatagaaggttgtgctggataactttcagctagtatttgcgctttttcttcacgaagttgctgatgtatgtgtgaatttaatggatcttccgttccgatttcataggtttcctcaaaattcccacactcataagggataaggggattatttgaatcagctgctaattgtagactgcaagaatctgattttgaaagatagtatacacagtctttgcaagtgaaaaagtttgaaaaagctgaatctgtttcttgttctgttacggtattatctactacaagttttaacatgtctatcacaatcctttttaggctagttcgtaaattaatatagacgtatcatatcatgcttataaacaaatgtaaatattttccaaataaaaataaccttattaattttgaaaggactgtttgtattgaatagaaatcgagaatatattgctttgcgaaattctatattaataggctggttactgacaggcatcgtaataggcctatctatccatttttcttctgttgtttatttattaattggatgtttcattctatcgttaaaatacggattaatgggtaccgtgaaaaatgtggaaaaacgtttgcctacctgggccaactttggcgtcattgaaaaaccagttaatagaagagtaaccagaccttttcagtttcgaggtgggctccttgtttcattagcattaggattcgtagagatggtgataaaaggcttatgtatctcatattttattttaggattagaaacgcatgtatatcgtttaatgcgcagaaacgcaagggtgtaaaaaggaggactctattatgaaagtattgatatttgaattgattcttattgcggttctaataccgttgaatagtgttgtgaaaaaacatgtaccaaaatggaaaggaaaagctggagagaaactggtaaaacgtatactaagtaaattagatccaaaaagttactttgtgttacataatgtgacggtttatacggagtatggtgatacaacgcaaattgatcatattgttatcgcggaaaccggtgtatttgttgtagagacaaagaactatgaaggatggatctatggaaatgagaaatctgcaaggtggacacaaggtatttttagaaagaaagcctcttttcaaaatccatttcgccaaaactataaacatataaaagccattgaatgggtgatggaacaacagctgccatgtatctctattgcagcgttccatccaaaatgcagtctaaaaagagtacatgttcattctaaagataaacatgtactatattataacgatctacaaaaatgtattgaatcatatactgaggtgcaactaacaaatgatgaggtccaacatatttatcaaactatgttgcgagcaaacataacggataagggtattgaaaagaaacatgtgaagtatttaaaaaataaatttgctaaacaataagaaatggagatagagacatgttatatgtagtagggtttatcgtaatctctatagtagctattcggcttaacatgaagtattacaagcttagggggaattttaaagattttgtaatgaagaaaaaagagtagaagatttctaataaaaggttttaaagtccatttcaattgaaatggactttagtattcgcataaggttaaaataaatcttttttattatgaaaatccccaagaatgttgcctttacatttgagggaaacaagaaagaaccctatttagataaaaaagggttctttcttgttttatgtagcacttattaaaaagaaaagccatgttataaaaaatgctacaactaagggaattatttttaaaaagattaataggtttttatttaagtaggtgtatttttctttgttgaaaatatattctagactaactgctatacaaatcaggatcagtataattaaaattgatttcttgatcagtaaattaggtaccaaattatataaactaagacctaagagtacgattatagatgcaaataatcgaatgttttttttcataaatcgttctccttttcaatttattagttacggtgtatgtgtgggtgtcctgtccacgtaattccaactgtaacgccttttcctttgttaacaacagctaatgtagcagctccaagtccaactatagccgcaattaatcctaatgggactgaagctggtattgttacatatccagctgctgctaattcggctgcaacccaaattgctgcactaccccatgccattgcttcagctagtgattgagtttcagaattacttagttttaatccgaatccccatccataaaaaccagctgaagaagattgtaattctttgaattggcttaggtcattattaacatatgaatttagtgtttgtgttgtggaaagttttccagggtttccttgttcatctttttctagagtgaaatatccttttttaatgtattcattttctaagtttaatccatttaagaagttttgatattcctcatttgttataccaatttcatctgctgttgcattaatatataaaagtccttctgcatttacttttacatatggagtaaatgtttttgttgtgttaagtgtttaattaaattgttcgtttgtttgaatgggaataaatttattactttgattttcttgtacttgctctgtttttactgctgtttgtttttctgttgcggcttgagaaatgctaggcgataggctaccaagtaataatgcaccacttaaaactgctgaaatctgtttaactttcattataaaaccacctttttattgtaatttggaatattttagattcctattacattgtagtttatatttgaaaatattgtaatattttgctatcaattggaatgttatgttcgattaccaaacccttacatataaacctaattatacaaaaaatgacagaaagattttttgtattcctagaatctcccactttttgaaattatatatatattcatattatcatgttattacactaggttaaattttgggtaagttgatatattaaattctgaatattttatttgtattattgtgtattatatacggaggtgcaactaacaaatgatgaattgcataaaggaagtattatgctataattgaattaatccaatactaaaaaatcatattgcaaaaggacacacctacgcataaccatagcgtaggtgtgtccttttttgtttgaggaggaaaaatgtatgggaaaaacgttatttattgcggaaaagccgaaagtggccaatgaaattatgaaatcgccacgtttccgacactcacaaaagtacattggaagcaaaccttattacggttattacgaaaatgatcattatattgtcagttggtgccgtggacatttactggaactgaaaaatccggaagagatggatccaaagtataaagtgtttcagttagaacatttacccttaatttttcaaccatcgtataaggtgatacaagaaaatgcagagcaactacaaatccttgttaaactgttacagcgacctgatgttgaccatgccgtgaacatatgtgacgcggaccgcgagggagagttaatctatagggaagtgtacgaatacgcaggtgtgaataaaaagcaatctcgcgtatataaatcctcttttgaagctgtagaactcgaagcagctctcaatcgattagaaagcgcgtctaagtatgatggactagcttattctgctaaagcaaggcagtatttagattatctattagggatgaatataaccaggggatgcaccacaaaattagcgcaaaataaattcctattggcatctggccgtgtacaaatgtgtttgctacatgagatccgtcaacgtgagttagcaattgaaaactataaggaacagtcttattatcatctgcagctagtaacaaatttaggactcactccagttatgaaaacagaagatcaggtgttaaacccatcgccattaaggagtttaggggagaagctaaaaggtcaatatctcacggttgaggaatttaaagagggcactaggaagcaaaatcctaaattgctatacaacttaacagacttgtacaaagatgcccatgcacaattacaaattaatgctgaaactgcaaaaaaatacattcagaacttgtatgaagaaggttttataacctatccacgctcttcgtctaggcatttacctacagaacaagtggaacgagtaaaaggtgttatgcaggcgctagctaagagtcgttattctttactggtacaatccgtcgatattgacgccattgatataaaacacaaaacatttgatgatgatcttgtatcaagccattttgccattataccgacgactaaacaatatcaagaggaaggtcgtccagagattgaacaacaactatacagtctcgtggtaaaacgttttgtgggcaatttcatgcgtcctgcagtgtacctggtaagagatgtatcccttattgatgcaatgggaaatacctatcaaataaaagaaagtgtgcttcgagaaaaaggtttcctagaagtgttccaagaggaagtagaggaagaaagtgtggaaacatttaaagttcctatcctgcagaaaggacaagaacttcaaatctatgattttgagttgctggaatccaaaacaaagaaacctgctctacacacagaaagctcaattcttgcttttatggaaacggctggtcgtaaaattgatgatgaacatttaaaagagctgatgaaaggaaaacgaattggaaccgtagcaacagaagcggcttttattccggctttacacgagaagaattttatagacattgaaaagggaaaaattattacaactccaattggccgtgcctttattgaacaatttcctgttcagcaaattaaagatccactgtacacagcagaaatggaaggaatgatacaccgtattgaaaagaatgaaatgagttataaagacttcattgtacaaacaaatgcgtttgtacaaaaaataacacaagagattataagaattcctgatacagtttcgtataatctaatagaaacctggaagcaacaaatagaagtatgccaatgcccttgtggaaatggaataattttagatagaggaaagtttttcgggtgcagcaatcatccgaactgtaacattggcttgcctaagaaaattaaagacaaaacaattcctacagtgcaagtaaaaaaactgtttgaagagaacaaaacggacgttataaaaggatttaaatctaatggcaaagagttttctgcttatctagcatttataaatggtgaagtaagctttaatttgcctacagttgaagaattatcgctaggtcagtgtccaaagtgtcaaaagggacacattttaaaccgtgataagttttttgggtgttcagaatatcaaaacggatgtaattttgcgatatcagctaaaattaaagaaaagaaattatctgatagccagattaagaaattattgaagaatcgcgttactgacttcattcatggttttaaaggagagtacggagaattcactgcagctatccgattaaaagaagatcttagcatttgttttgaacgtccaacaacggatgatcgtactatagggaaatgtcctttgtgccaaggaagggtaattgtaggaaaaactacttatttatgtgaacattacaaaaatccttgcgaattcattgtgtctggaagcattttgaaaaagaaaataactagcgcacaagtaaaaaagttattagagaagaatatgaccgatacaatctcaggatttgaaagtaagaaaaccggagaaaaattcgatgcaaaattaacctatgatgtacaaaaacaacgtattacatttataatgaataaaaagaaataatatcataaaatcttaaatttcatatataaaattaataggaactatgatatgatgaaagtaacaaaatacttctaaaactatcttgcaaaaggacacacctacgcatacatatgccataggtgtgtccttttttatgtatttttagaatttcaagactcaaaagggggatatatattgtgtaccagtaatatagcatctgctaatgtatcttttgaaaaattgaaaagtcaggaagagaatgaagaaagtatggtgtcaatatgcccgcagtgtaaggaacggtcatatacagcactttataatgatcatccaaaatggatacagttttgcctatgttgtaattatcgagaagtaaatactatgaatagtccgtttgtttattagatgcagctatttacgtattttaagtaggaggaagaaatttcgatatgaaaatatggattaaagctatttgtataacatcattcgtaattcaaatgtcagcatgtagcagttccgtgcaaacaaaaaatgattcgagacctgcccaagcagtacaaaacggaatacaacagaacgtagaagggaaaggtattgttgatattccagaagcttataaagggaaattaaaaggcttagagaccgttaaagggaaggtattacatattaaagacggagatacgatagacgtaaacgtaaaggggcagaaacagacggtaaggttacttttattagatacccctgagtctgtatctaataaaatcccaccacaaaagatgggaaaagaagcctcttcctttttaaggaaacagctagaagggaaaagtgtaactttggtttatgatcgagggcaaaaagaagacaaatacggtaggaaattagcttatgtcttttgtgatggaatacacatcaacgaaataatgatcaaatcgggttatgggattatagcctatatttctagacctaatactacattgctaccagaaatgctagaagcagaaaaagaagcaaaagaaacaagggctggtgtgtggaacattaaaggatttgtagatgaaaagaaccgccactataaccgcaatgatgcagcttaatatcgatacttattcaaaaaggaggtccataaatgaatggaaacaaaagaaacatgttcttatctttttttatttcaactttctttatttttttgagtctcttgccgtttagtagtaatgaatatgtatatgttatttcaaaaatcggggctgcagctggtgtaataaatattgtgatgatgagcgtattcttatattttcagagcaaaaaaacgagacatctcttgagttaatatgatacaaataccagttttccttactcatacgtaaaagataagagtaaggaaaactgaaaggggaagttgaagatgagtcaaatgccgggggtcttgaagtttgttttagcaaaggaaaaacgatatgtatatttggttgtagcagaaaagaaaaacaaacgagtgaaaacacatgttgtatatggattcggtccactagagaaagcattagaaactatgtatggaatgcgtgataattttgagaatcgctttccaccagatttaaaagataagggatatgactgggaagatttaaatgattggatactatccatagaaacaggctattccaaatacggaaataagttagtgacattctaaatagaaaagtgaggtagtatcacatgcttgatacgaaatctttagaaccgtatttttgtttttctaattcaccaggtattcagtatatcggaacgtattgtccagattattctaaagatgaaaataaacatgtaaaagattttttgcgaaaactcatagattgcctttcgcatgttgaaccggcatacagccatgaaattatattaagatttttacaggatgaaacatatcaacaagagatactatcacatgcgaattttcagtccgcattcgatgaacaagcaaaagattctattattcatatgctagtaaatgagtctgaaataatagaaacagtaagtactagaatgaagcagttaataaacggagtaagaaagccgatggatcctgataagtatgttttactagattttattcaaaaggcaaatacatattttgtaccgatagacgatggacgtaaggagtatacaaaatggaactgatccgtaagtatcatattttctgcgcttggacaatcgctataagtgcaatgttgattagtttgttttttagtgaatggatgaagttacctccatgtgatttgtgctggtatcaaaggatggccatgtatccattagtattaatattggggataggaatgtacagaaaagatccgaacgtcagcacgtatgcattcccatttgcgtgtatcggcttaatgttatctgtatatcaaattacaattcaaacgtttccagctagtgagatgaagatatgttcagtaggagtttcttgtacagaagattatctgaatttatttggtttcatctcgatacctatgctatcatttgttggaattttagccatcatagtacttttatatattaaacctgataaagagacaaaagaacaaataacacagcgattataatcgatatactcatataaacacaaaatacttataacttaaaaataaaaaaggaaactaaaaaggagaaattaaaatgacaactattcaagcaagtaatgaaatgcacaaaatcccagaggcggatgtagaattattaaagattatggcccatccagttagattacaaatcgtgaaggagctagaacaccgcaagatttgtaatgtaacacaattaacggagctattaaatattcctcaatctacggtatctcagcatttatctaaaatgcgtgggaagattcttcgttcggaaagaaggggattagagatgtattatcatattgtaaattcaaaggcatgtcagattgttagtgtactaggtttatagaatagtcttgaacggtaaaacaagaacctcatttcatttttgggttcttgttttactatagttttagaataatagttttaatattttgaattttattgatatatattcaaaaatacacctattaaattacaaattctgttattatattattaaaagaaaatatgataattggtattgagggggtagattatgaatatagcaatcaaaggaaacgaacagattctgggcttattaaatgattggtatgtggaaattcgtgcacggcgcataagcaatgcgcatcgtttaaaagaagaaattgatggtaaaattcaaaatataaaagatcagaacttattattatactattcattattagattttcgtcatcaatatgtaattgataacttaggtgtttctacaagtagttttgataaagtagaatcttttgagattccttctaacaacactttaacttattattatcatttctttaaagctatccatgctagtggaactggtagttataaggttgcaaaagaacactttgatcaagccgaaaaattattagagcttatcaatgatgacgttgagaaagctgaattttattataagttaggtgcattccattttgatatttgtgattcactggtctcttttcagtacacaacaaaggcaaaagaaatgtttttagcccatgctgattatgaacgtaatgtcggcttttgtgagaacttgttggggttagcttgtataaacttaaaagaatggtcattagcagaggaacattttgcggccgcaatggacaagttccaaaaagtcggagaagataagtttattattatggtgcgccataacttgggttggatgtattctaaacaaaatctatcatctttagcgattcgttatttatctgaagtcgttgaaaattctccaaaccattacaaagccatgtatgcaaaggcattggaacattacaaactggacgagcgagatgtcgcagcagaactcattgaaaatggattaaatattagtaagaaacttaatcaagaagagttcatacatcgatatctcattttacaagagctaaacaatgcttcacctactcaaaagctcgaaaccgtagtgctagcaggaattgattacttcgaaagagaaggattgtatgaagatgttcaagagtcttatgagacgctgggaacaaaattttatgacgaaaagaatcatcatgaggcgagtaagtatttccatttagggttgaaagcgaaacgaaaattttttgaggaaggagctttaaaatgaaaaaaatagtattcagtttaatgggaattgtcacggctataaccttgactataggtgtgacgaatacagcgaaaactccacaatcttacgaagtaattcaaagtctttcagttggagatcacggtggttgatacactaatttaatgtataataaaaagggctaggatttatcatctagtcctttttttattgattggatgttttcataaggttcaattcgtaaaattgttaaagcgtatgccgtgattcgaggcctactacgtctttggttcaaataagaaaaaatacgattggggagtgaagagcaataaagaatcatatcaggagccctcagggacaactattgcaaatcaataagaaatggtctcacctaaagcaaaaacagcgtgaaaccatatcaacttggctgagagaggcttatatagagaagattaaagttcataaccgtagattgaaagcgagagaacatgaggatgttttagaaagggtaatgagtaaaatctatgatcgtaaaatttggattcctgattatgaagtcgaaaagtattacaagggaaaaataaatagatggtataacaaacacatttcattggatgaaaaaaatgataaggaggagaatatatgaaacatagtatcggaaatgtgagtacttcatatataatccgtctaattttaaatgatttagacggatttattacagcaggaaaaagggaatttaatttttgctcagaatccggagtatcctctgtggaggagctaatttctgattggttggagtggtttaatgattacccgcaaggtatatcgccagatgaattaaaagaaattgaaagggagataggtgaattgatggggagtatgtttatatggtctcataatattgaagaaagagaagggtttataaagcaatttagcgattatttcggagaatatataggtttttgtaaattagttagggatgtatatcttgaagagttgaaagatgagttgtcatattaacatcataaattcctaatattattataaaaagaaattaaaactaatgttctttaaataatgaaaaagttaaaggagaaaagaaagtgaaattagagattgaaaagtttattagtgaaatagaatttccggaagctgctatgggtcttattgaagagggaatattatgttataaagcaggagcttataggtcagcgtatatcatgtcatatttatttttcttaagtgtagtgaagcacagagcattagaaagttcatatgctcccattgggtatggtagggaacgaaagaagaaaacagacgaaattccaaacgatgaattctgggaaagaaaagtattcgacttaattactacaggaaaatcacatagttgttattttgaagttagcgaattgataattacacaaatggaatattggaggactttgagacacgagtgtgtactttctaaaggtaatcagtttgtagcagcgcatgttgaatcattttggttatttttacaaacaactctccctgagttattaattaactgtaggaagaatgtcttatctagagaggctgaggagattttagaaaatttgtttgaatgggataaaaagtgaagaggttttatcggatactttaatgaagaggaggaagctatgacaatgtagcttcccctaaataattgcacaaaatgttgattttgtgcaattattagtattttttattcaaattgtcttctttccaagcgatcaacagcctcacgtttcttctcattattaatatttgtatagatactagtaacttctacagaagtgtggccaagttgatctcggagtaatactaggtctttgttttccttataatgatttgtagcatatgtgtgccgtagtttatgagggctacgcttctcatcaaatgcacttgaatatttatcacataacttctgtatagctctaacagttaactgtgtatatttccccttataatttgttacaaaaagtaagtcttcatcttgagggcagttatatttactaggacgaaccttaatgtactcctgaatatcatctaagcaagagcgagtagctaatacggaagatctcttattacctttacgcgttacttttactttcccctggcggaagtttatgctagatatagtaagactagctacctcagaaactcgaagcccagtgcctaaaatgaggcttataatggctatgtctctttctttatcacgctgaaaaaaattatatttttttggtgatatatctttcaatatttcaccataatcatttgctagaaattgaagaaaagcaacatcatctttttcattaaatatcatgtttgcaacgtcatctgctcttgctgctgcatctactttctccttatgcagttcaattttctccattacattacgagagatgtaattttccccttgttcattctctgtatttagagctaagtacttgaatagggattttaaagcggagaaagttctgttaatagctcttgtctcaataccttctccctgtagatatctttgaaaagttctagcttcatttaatggtagattttctagtgttgaaattggtacatcacatatattagtgaccaccttaccgttttcgacggctaatcgattacttataagccattttagaaacttttcaaattcagtaatgtaagcatacaatgtagcgggggagagggctgttttcatttctgcatactctatgatatactagggcattttacttttatgcttatctattagtattttaaacttttctttttcttggttactcatgttgtacacatcaaatcaaataatgtaaattattttttaaactaatacttaaaccgatatttaaactaactattcggatttttgagctagaatgctattttaataaataacttgattacatatatggataccataatagtttttgaaaaagaagagaggtatcaatatataattgatacctctactatactcaattctatgaaatccatcaaactgttcgttaaatacacttttaacggatacattatatgagataattattgtaaattgaagaattattattacattctgtatgctattgaatagagaactggtgtatggttaaattcactttactgttaattctccaaattggtcatatagtaattttaaacgaatagaatgattttcttttaaaagctcataggcttcacgaagtaatttatgtcttttgttatagagtgtagaacatgtaaatgtgtttgaattacaacaaggacagacaatacccataatggccgtattaaaagcaataagagtattttgatctggatcaatcttacaaaataaacgaacagagttacctgtgtctggctttacaatgattgtgaccatgttatcttctttacgaatattcccattagaatccatctctaaagtggcatgtgttagtttcaattactttcactccttaatttttatgtattagtagaatttttggagtatctaaataaacaaagtttatatttagataagtgcgatttcttaagttcatacaattagtattataacatctatatcccatctgctagtgtacaaggacatgaatctctaaactattttgacaaaaaaatataaacttaatataaaaaaatcaattatctatagtaatctaatcttaattaagtaaaatctttaattcatacaaaaataatgctcagagtcatttaagaactttgagctttaaggagctgactgtggtgaaaaaataatataagagttaataaaaaagagtgcaaaacatgtctgcattcttttttattgcgccctagctacaataggtaaagtatttgtaataaagataggtgtatacatctataacttagatttgggctaatttctccatttttcaagcaaaggaaatatagagtttatttatgtgtatagtgagaattaaggtttagaatattctgtgtcaacattatcaatttactatagtttacaattatgtaaaaatagagatgattataatttttcgaaatagtatattaaaagctatcttaagggtaatgtgagcatttatagcctacttataaagtgggatcaagttcttgtagaattcactaaacaaaatgaggtgactgtaaattgagagaaattgcgaaaaaagtacaaatgatacgtttacaggaggagcatttcggaagtcatgcagacgcagaacagtattgtgccaagcggtgtaaaatagaacgagagagaattaaattagaaaaaaatatagttaaaaaacgaactcaaaaatttcaaacgacagaagaaaaatgggactcaaaatgtaaaaaagcagtacaattatttaatcaaggagaggaatatccaactattgcaaaaaaactgaggtgcaatgtgagtaatttgtatagagagctcaagaaacggggcgtattacaaatgccaaagcaagtagcatcatctaaatcattaaagtcatccataataccaccacaaacaaaaaaatcgaagttcgaacgatataaagagtattatatgtataaatagaagaattaaaggctactcgaaagttgcaaatatttacataatttacctgtaactaatggactttaaataaaaaatttaattaaaaatacaaattaataataattacatctaaaaaattttattcttagatgtatcacgaaatacactttttgaaatcacatttagctctcttctgaattaaacttattctccttttggcagaataaataaaaatacccaaataacaaaaatgtggattaaaaaaaataagagattttttagtgtttgcttctaaatgtccgctaatgtttaatgttacacggttctctgaaatttgttattcactctgtatattttataaccgttattcttaatataatattaaatgaattttttataaatggaaggggatatataatgttaactgaattacaacaaaagtttttcttaaagttaaaaattccaccaaaagaaaatgtgaattttgaagatttgcatacaattcttttacagatggggcacttattaccgtatgaaaacatagacatcatggaaggaaatatacaagaattttctagagaaactattgaagaaaaactacttttaaagaatcgtggaggattatgctatgagattaattctttattatattattttttgtgtgattgtggatttaatgtgtatcgaatagctggaaccctttatgattcgaaaataggaaagtggaacccggatgatggacacgcacttatcgttttacagcacaaaaatgaaaactatataatagatgctggttttgcatcctatcttcctttacatcctgttccttttcatggtgacagtgtgacttctgtaacgggagaatatcgtgttcgtaggcaaaatacagagaaagggacctatgtatttgaaatgaaaaaagggaaaaatggggaaacttctcattttcttgattcggatcttactgatacctggtctatcggctacgctttttatttaaatgcaattgatgaaaagaaaataaatgctatacaaaatatggttatagagcatctagaatcgccagtaaataaggggagtattatttgcaaattaattggaaacggtcatattgcacttactgagaaaagttttaccgaaactcggcacggaaagaagtctaaaaaagaaataacagtgaaacaatattatcaaatacttagagataaattcaatatatttttagacatatagcctgaagttaattgtaaaggttcaccatattatttcgcgaaaattgtatgtttctgcacacgttaatactgaacaaaaaattataggatttcgcttttttcgtgttcaaagctcttttaaacttacctatattcagataattaaatggaattaagttactaagaaaaagggaattttactatatttttaaagagtgaggttcctatacttgggcagattattgcaacggataaatttgccattcttatgatggttcatggcaagcaacaactagtctacaaaaaagcaatttccacaatcattaagtaattctttttcctttttttaaaggagggaaaaacaacaaaaaaaagaaggttgaaatcaaccttctttaaaataaaggaacagatgacagattactactccaactcttaatcaattataataaagttagtgcgaatattcaattcgttataaaatttcttaatatttatggcttattttcaaattataatatgagtaattctttttattaatatatgttcgatctttcctgttgcagaatgaacagctccctgtcaagtagacagtggaaataataaaaaacactttaagcggcttgaaccctgtattctaatgggcttaagccgtttaatttttcttggtaacgttcattattgtaaaactggatataattatctatcgcttgttgtaacgcttcaaatgtctcatacttatgtaggtaatacttttcacacttcaacgtcccccaaaacgattccattggtccattatctatacattttcctacacgtgacatgctatgaatcatttttgccttttctatctttctcttaaacccatgtgacgtatattgataccctcgatcactatgaatcaatggatgttcattctcttttaatatagtgatagcttgatccaatgtttgaaataccaatttattattgtttgaatgttccaatacataactaataatagacccatcataaagatctaaaatggcgcttaaatacgttttccttccgtttcctaatttgaactccgtgacatctgttacccatttttcattgggtttgcttgcagtaaattcacgatttagtcggttttcagcgacatattgcgcagttgagggaacatagcgctttcttttccgacgaatcacggactgtaatccagcaatgtgcattaagcgataaatgcgtttgtgattaaactttttatgatacattctattaatatttaatttcattcttcggtacccataaatgccttctactcgtgcataaatagcttgaatatccagaagaattgcttcattctctaattctctagctgttggcgtacgctgtagccatttataataagcagcacgagatacaccggcaatttcacataaaaggattactgccaaattttcatgcgcatgtaaatcttgaatcgctctatatttattttgtagacgaacgcttgttaacgacgcctcctttcgagttcttctaacttttttaaaaaagcattttctgcacgtaatcgttcattttctcgttctaaacgtttcatttccagtttaaacttttcttcagctgttaattcatattcttctttctttcgaccgcgtttatcttgtagtgcttcttcaccatttgcttcaaacttcttgacccattgatatacttgttgataagaaacttcataactttcggcagtgagctgatagtttttctgatgttgtatacagtaattcacaatttgaattcgttcttctaacgttgtttttcttctacttgtcatagagtttgtcattcctttaccggtatcatttagttctctatgactattatactttttaatccattttctcaaaaccgcagtactggatatattgtatttttggataatcttgtttaacgaatcgtgtcctgatagataatcattgacggctgctaactttagctcttttgagtaacgcttccaagaaagtgcttcttctaggccgtcttcaccattcacttcataccttcttttccaatctctaatcgtcccaggatcaacagaaaactttgccgtaatgtcagctattgaatgatgaccatctttataaagagctaaaatcgccaatttttcagctttagaatatttcattctagccataaaaaatactccccttagataacagatttttattttttatctgtctacctaatagggagcatatcagaatccttattataaggattctttttttgtcttacaaattcacaaatagaaaagataaaattggagagcatgaccttatctttttcataaggagaaaaaagaaaaaattgtttgtagagaataaaatagagattatacaaggatttaaatctaatgacaaagagttttctacttatctagaaattttaacgtatttcccgaaagaagtctccttcctcaagcgtgtgaagggcgtagcccgacgataggtgggagataaatttcggtttggcggagccaaaaggctttgctttttattttccctctgatagaatcagtcttataaagaatgaagattggtatatcaatgaaattagataataataataataatcattcggtgttcttgctatattatcaccttgtattggttgtgaaatatagaagaaatgtgttcaatgatgatatatcagactatgcaaaagatatgtttgtcaggttatcagagaattataacataacattggtagagtggaatcatgatgtagaccatgttcatattttgttcaaggctcatccgaatacagaaatgacaaaatttattaatgcttataaaagtgcaagttctcgactcatcaagagagactttccacgagtgaaaacaaaactttggaaagagatgttttggtcaagaagtttttgcttattaactactagcggttctccaataaacgtagtaaagaaatatattgaaaatcaaggtggaaagtgaggtgaaatgatatgacaaagcacaataaggcatataaattccgtttgtatccaacagaagaacaagcatatcttatgcgtaaaaccttcggttgtgtacgttttgtgtataatagaatgttagctgaacgaaaagaagcgtacgaaaaatacaaagatgataaggaacaactaaagaaacaaaagcctccaactcccgcgaaatataaagcagaatttgagtggttaaaagaagtggattcattagctttggcaaatgctcaaataaacttgcaaactgcctataagaatttctttagtggtcaaaatgacttcccaacattcaaaagtaaaaaagacagaaagtcttatacaacgaatgtagtaaacggaaatattatgttgctaaatcgtcatatcaaattgccaaaattgaaaatggtacgtatcaaacaacatagagagataccacaaaattatagaatcaagtcatgtacgatttctatgactcctacgggtaaatactatgtgtccatcttgactgaatatgaaaaagaaattgtacaaaaagaagtagaaacagttgtggggttagactttgcgatggatggattatacgttagttctgaggatgagaaagccaattatcctaatttctatcgtaacatgttagaccgattagcaaaggcacaacgagtattatcaaggcgcaataaaggttctgagcgttggcagaaacaacgtattcgtgtagctaaattacatgagaaagtagctaactaacgtaagaatttccttcatcatgagtctaaaaagttagctattcattttgatgtcgtagctattgaagatctaaacatgaaaggaatgtcgcaagcacttcattttggaaaaagtgtcgctgataatgggtggggtatgttcacttctttcttagcttataaactaaacgaacaaggaaaacaacttttgaaaatagacaaatggtttccttccaccaaaacatgtagcaattgtgggaatatgaaaaatatgactttgtctgaacgaatctattcttgtatatgcggtgtaaatctcgatagagattataacgcagctatcaatatcaaaaatgaagcaatacgactattagcgttaggataaatagcaataaaataacctttggaacaagggagttagctcggctgtctaaggacaaattcgttagctattaaaagtaatgattaaccgagaagcccccacttcaaacagtccgttaggacgttaagtggcgggtagttcacaagaattagatcaaaagtcattttctcataatagagtacataacggatgggcattactttttgatactttgtatgagcattggacgatgtggaaagggcctttttttgatggcgctcatagggagaagtatgtagaatttttaagtgtattagataaaataactgataacttgggcacagctgctgatgcatatgattataaaacattttatatgaggaaattaagatgtgagatgatccaattactattacatttcagccgaaaattaataatagtatagttcccagcatagatgatctaatcaagggaattgatgaaacaatattattatggaatgaattgaaaaatatggttaatgaacgttatgagcatgaacgatccaaacgttccagtttataaaagaagaaagtttttatgaattgctttttttatgtgattgctatcattttatagattttctgattcatattacgtcaaaaaaggtattgaaaatatttattctggatattttcaataccttttttctaatgtaggaaagaagttgggatttttgattttacttactaaaagtttattcttataaaaaagataaatattgataatatggcaatattattattaagtgtaatgaccttgaaaaatttaaatatatcttttaagaaataaaaaaagaacctacctaggttctttttttatagttggtaaatacgtaattaactatagatggtaataaagataatattttggatatctttaatcacttagctggtttctattggtagaatcctttttgctcacgtttcatagatacagaataaattttagcttactaaattggatgagttaacttctgagaatctttaagctgaattgtaaaaactagttagggacataatgaaaaagttggtttaactgagctcacagtatttttagcgatgaaatttcgttgaatatagtataagatatctcatattccattggacctatagcctattttcatgatttatccgtacaattttacgaggcataggcaaagaaatcctttacggcttattaccatctattgttcgactatgataatatcataacaataaagcgtttacaactgaaaaacaaagataatatatgaacattcgacttttttcgacatggattattttatgaaaatgcatcaaaaaatcaagaaaatatgtaatttccattacaaatctattatgttttgcttctaattgtgtaatttaactgtatatttatatgatttaagttatatatcctattcttttgagtgttaagttggaattgagttctttggccatttcttgaactacccccactttcacttcgtttagaagtgagggattcctaatcaattagagttctatcgaactctaattgattaggctaaccccgcagtccttgcggttagaagccttatcgcttcattctttagattgatacttgcgttaatatccctatcatgatgtgtacgacaagaaggacagtcccattcacgtaggtttagatttttaacgtctttattttgatatccacaacaagaacataattggctggaagcaaatgttttcgatacgacaatgacttgtttgccataccattttgctttgtattctaacatggatcgaaattgcgaccgaaaatgtacatatttattcaagcgttaatgtacatatttaagttagcatttatagtaggccattattttgctttttcgttatatcatatagtataatattcaaaatcagcaaggattttttcctgaatttttgctgatgaagatggaaaaatttttcggctttataggttgataaagttatgtcgtaacaggaaatataagaacagatatataaataaataaaaagaacataaaaacgcaaataaaaacgaaaatgaggggaactttatgagccaaaatcaattcgaatgtcgtatttcagaagaagatgtacaaatgttaagagcgttagctcacccacttcgtctacgtctagtaatggaacttatgcaaagaggaacatgtaatgtaacacagctacaggaagtattagaaattccacaatcaactgtttcacaacatttaacgaagttaaagcaaaataaagtagtacgctttgaaagacgaggattagaagtgtattatcaaatccataatgataaagtaagtgcggtagtaaaaacattattttcttaaaatttgaatattatggaaaaagacgtgtagaatatacgtctttttttatttgtcagaaaggtagcgagagagtaaatattagcatgttaggaagaaatgactatcaatcaacatgctgccttacggaatatattctaaaaggaaaagaaaaaatagaaaggagtgtagtaagcaaaaggagggatagtagtatggatgtgaaacgtgtgaaacaaatcttatcttcttcaagtagaattgacgttacatatgagggcgtaccagtatggattgagagctgtgatgagcagaaggggagtgctcaagtgtatgatgtatctaatcctggtgagagcgttcatgtggacgtgacagctttagaggagaagtaataaaaaagacgcttctaattttagaagcgtctttttgttattccatcatatgtgcaattttcttagagaacataagaagtactaatcccagtacaattacgataataccgatgcttgcgaatacttctaaatatcctaaagattgagtgaaagcggctaattgtcctgctaataagtttgcgaagccagtaccagctaaccatacacccattaataatgatgctaatttaacaggagcgattgcacttaccatagataatccgattggtgataagaataactcaccgattgtgtggaacatgtaagtgaatacaatgaatagtaagtttgctttcattgtaatgttactttcatcgctaccagtttttaaaacagctaaagttagaactaaatatccaatccctagtaaaatcatacctaatgccatttttgttgggattttcaaatcgccattttttgtttttgaaagtttaatccataacgcagaaacaggtaatgctagtaagataatgaatagtgggtttacagattggaaccaaggtgttggaattgtaaatccaccaattgtacgatctacgaacttatctgtgtaaagtgttaaagaactaccagcttgctcaaatcctgcccagaagaatacaacgaaacaagttaaaattaaaattgcagcagtacgttttttctcttgtgttgttaaaggttttttctcaattgcttttgcatttttttctttagatttttttcctacaacagttgttccgatagaccctaagtaacgaggtgctaagaaattaaaggcaagctgcccaataatcataccgatacaagctgttaagaaaccgtatctataatctgcgaagtaaccgcaaatgaatggagcgataagagctcctaagttaatccccatgtagaagatagtgaaggcactatcacgacgagaatcgttttcgctatataattgacctaataaagtcgaaatatttggtttgaagaatccgttaccaataactaataatcctaatcctaagaaaagtccagtttttgtgttcattgagaataatacaaagttaccaattgccatgatgataccaccaatagtaatggcatgtcgcttcgtaatgaaatggtcagttaaccaaccaccaataataggtgtgaagtatactaacattgtgaaaataccgtaaatttgaactgcaactgctttatcaaatcctaaaccgccgcttactaagctcgttgttaaataaagaactaataagccacgcattccgtaataactaaatctttcccatgcctctgtaaagaacaacaagtataaccctggtggatgtttttttggtgattgttgctctccagctttgtctaattttaaagctgcatccatttttgtttccccctaatcctgtataacggatatttatgtaatcattttaatttacaaaatatttagaagtcaatagaattatatggaaatagaaagaaaatttctaaaaaagttctatttttcttcgaccgttactgtattttgccctgaaaacgagatgataagcgttttcaaatgtaataattgaattctaaaagaaaataaaatagtgattaatcagaaaatttagattaaaacatttattctgatataaagaaaaaatattctatttactttctcaatataacatattgggaataaaaatacaaaacgaaataatgtgacatttaagtgaattgaaaaataaccagctccacagaagggagctggttaaggaaatattatttaacaaagcgtttttcgatgtcatctaatagtaggttagcggccattacgccaccagctgtattccaaataacgtcatcaactttgtatgctttaccattttttactgcatttaaatttttaaatagaggatcgtttatatactctttttctagttcagatccttttttctcatttcctttatcgaatgtgaagtagaataatacgtcaccatccatagcagaaatacgctctttagatacgttacgctctgcaaaatcatctttattttgatctccaggacgtttaaatccaagttcttttaaaataacaccagagaatgtatcgccatgataaatacgaacatcaccaggcatgaaacgaaccatagagatttcttggtttactttatcaccaagtttgccttttaaatcttttatacgtgattcgtaatcagctacaactttttgaccttctttttctttatttaatgcttttgcataaaatttgaagttatctttccattcaccacgtaatgtatctgagaacacagtaggtgcaattgcttttagttgttcgtacactttttcgtggcgcattttattaccgataattaagtctggttttaaagaagcaattgtttcaacgttaacttgtccttcatcaccaacaacttttacatctttcattttatccttaatatgtggataccatgggtcaccagtccaagactttacagcaccaactggtttcacacctaattcaagtaaagcttcagttccttcatttgttaagataactacacgttttggattagcaggaacttctgttttacccattgcatgttcaaccgtaatcatttctttttttgtatcttctttcgtatttgattttccacaagcacttaaaagtagtgaaaaggctaataaaaatacaaatactgtaaacgaattttttcgcatgaaattcattatgtaccccctacatagtgagaatttttttcaatagcaagcatgatgttaagtctttatctttttattgtcaatacatatggatgaaaataattctcatttccgttgacaatgagaattaagttgaaatacactaacaacgtatcattatacattgaaggggaaacgctgcatgttattaaaaacaaatcgagcaaaatggattggattatttgttggaatcattgcagtcgttatttgtatttggggaagtattatttttggatatacaaatacgagttggaaactagcattggatgcttttttccattttaacggttccaatgaacatattattattcaaaacgtacgtctgcctagggcgttaattgcagctagtgttggtgctagtttagccattgctggttgtcttatgcaaactttaactaagaatccacttgcttctccagattttattggattaaattcaggtgctgcgttcttcatagttgtagcaattgtaatcttttcagtaacatcattatcagctttcacatggattgcctttttaggagcggcggttgcagctgtacttgtatttgcttctagttctttaggaaaagaaggaactactcctcttaagttaacgttagcaggggtcgcaattagtgcgttattttcatcattaacacaaggattacttgtgttaaatgaaaaagcacttgaagaggtattattttggcttgctggatctgtgcaagggagaaagttagaaattttacaatctgtattcccatatttattaataggatggattgcatctcttatgatggcagggaaagtaaatacattgatgatgggagaagacgtcgcgaaaggacttggacaacgaacaattttaatgaaatcattcgtgttacttattattgtactgttgtctggtggttcggttgcggttgctggcccaattggatttattggaattattaccccgcattttgccagatttctagttggagtagatcataggtggagagtaccgtatagcggtttattaggtgcaatactattaatcttagctgatatagcagcaagatatgtcattatgccacaagaagtaccagtaggagttatgacagcatttattggagctccattctttatttatattgcacgtaagagagggcttagcaaatgaaaaaatatattccgtttcgtatagggaaaggcgggccctcgtttttaatgtataaacgagcttgtctcgtcttatttagtttattagttgttttaataggattattttttgcgagtgcaggtatgggagacatgaaaattgctccttatgatgtatggcaagcgatcactggaaatggcgatgcgatgtctaacatggttgtaaataagtttcgtatgccgcgtattttaattgccatcctcgtaggaattgcgcttgctgtagcaggatgtattttacaaggtctcgttcgaaatccacttgcttctccggatatcatcgggattacgggcggggcaagtgttgcagttgtattgtttttagctatatttagtgataaaaataatgcgctaactgtaagcattcattatatgccgttagcagcctttgttggggcaacgattgtggcgctttttgtatatttatttgcatggagaaatgacgggttatcgccgattagtcttgttttaattggtgtggggttttgggcattaacgaaagcggcaacgactttgtttatgttgttagcaccaatttatcaagcgagtcaagcgaatgtatggattacaggtactgtttatggttcttcatggcaaaacgttatggtgcttgcaccgtgggttctcattttaacggtaatatcatttatagctgctagacatttaaatgcgcaagagctaggggatgatattgcggtaggacttggtgttcctttaacgaagtcacgcgtattcatgttattacttagtacggctttaattgggggagcagttgccttcgccggaggaattggatttgtcggtttaatggcacctcatatttcacgaaggctagttggttctttatacggtgcattactcccagttgcagctattgttggtgcaattctagtacttgctgcagatttaattgggcgtacagttttcacaccacttgaaattccagcaggggtatttacatcagcaattggtgcaccttattttatttatttactttataaaagtcggaattcataaagggagatgaatatgcaaaaagcattggagacgaaacgtttgacgttgtcttatggtgaaacaattattattgatgagttgaatttagaaattccaaaaggtgaaattacaatctttatcggttccaacggttgcgggaaatcaactttattacgttcactagctagattattaaagccaacaactggtgacattttgttagataatcaagctattcaaagtatgcaaactaagcaaattgctcgtcaaatggcaattttaccgcaaggaccgcaagcacctgaagggcttacagtattgcaacttgtaaaacaaggacgctatccatatcaaacatggctgaaacagtggtcagaaaaagatgaggaaatggtacagaaggcacttgcagcaacaggtatgacagaatttgctgagcgtgatgtgcatgctctttcaggtggacaacgacaacgtgcttggattgcaatgacgcttgcacaagatacagatattattttactggatgagcctactacatatttagatatgactcaccaaattgaggtgctagatttattattcgaattaaatgaaacagaacaaagaacaattgtcatggtattacacgatttaaatttagcatgtcgctatgcagataacattgtagccattcaagataaacaaatatatgcacaaggtaaacctgaagaagtggtagatgagaaactagtacgtgatgtattccgaatggagtgtcaaattagtacggatccgttgtttggaacaccgctttgtatacctcacggaagaggaagacgtgtagttaaagaagttgctcaggcaatgagataaaaaaacgatgagtgattcatcgtttttttatttggtacaagaaaataagaggaagagaggaatacgtaagcgacgtttatactcttcttcattttgaaaataggttggatttggtgtagcttcttttaatgatgtaatggtaaatccggcttgctgtaataatgtgaaataatcttccgttgtacgatgatatttaataacttcttggtcaatccatggttcaacccgtttgcctagtttaaagtaatcatcgacgagccaactcattcttttaccacttgtttgtaagctttcaaacgaagaagtaataacaggatgttgaacgctaaaggtaaaggtgccatttgtttttaaagtttgaaacacattttgaaaaatgctatcaagatgttcaatataatgtaaggcgagtctagatgttactaaatcaaaagtggaagaggggtaggtataatctttgaggtttaaaaaatgaacagttccatttttattttctagttgttttttagctttttcatacataagttcggagccttcaatgccggtgtaagagtagcatcccttttctaataattccgcgccaaacttagcatcaccacagcctaaatcgagaatttgttttcctcgtacatgaccaatgagctgaaagaatattggtttttcaatggattcatttgggctattttctcggtatcttcgtttcatatattgttcgaaaaatgctgtgttattgtatacatcagattctgtaaatgccatgtttgaaacctcctgaaatatttttttaattctatcaaatatgaaaagtaaataatagatttattgtaatgaatcatatataatctaaaattgtaagcggttactttaaactatttttctataataaattctgaaaacgtgttaagctagtagagggattattagaactattaagacaataatccgcttacatgaacgatgggaggcttcacgatgtctagtaaaacacttgcgaaatttttagaagaaaatttagaggatttaaaatcaaaggggctttataacgtaattgatccgcttgagagttcaaatggaccgatcattacaattggcggaaaagaatatattaacttatcttcaaacaactatcttggattagcaacagatagccgtttgcaagaagcagcaattggtgctattcataagtacggtgttggagcaggggctgttcgtacaattaacggtactttagatttgcatattaagttagaagaaacaattgcaaagtttaaacatacagaagcagcaattgcttatcaatcaggatttaactgtaatatggcagcgatttcagctgttatggataaaaatgatgcaattctttcagacgaattaaaccatgcttctattattgatggtagtcgtctatcaaaagcaaaaattattgtttataaacattcggatatggaagatttacgccaaaaagcaattgcggcgaaagaatcaggtctttacaataaattaatggtaattacagacggtgtcttttcaatggatggagatgttgcaaaactaccagaaattgttgagattgcagaagagttagatttaatgacatacgtagatgatgcacacggttcaggtgtacttggaaaaggtgcaggaactgtaaagcacttcggtctttctgataaagttgatttccaaattggtacattatcaaaagcaattggggtaattggtggatatgtagcagggaaacaaaacttaattgactggttaaaagttcgttcacgtccattcttattctctacagcattaacaccagctgatgcagcagcttgcatgagatcaattgaaatcttaatggaaagcacagagttacacgatcgcttatgggaaaatggccgctacttgaaacaaggattaaaagaacttggctttaacattggagaaagtgaaacgccaattacaccttgtatcattggggacgaagtattaacacaagaatttagtaaacgtctaaatgaagaaggggtatacgcaaaatctatcgtgttcccaactgtagcaaaaggaacagggcgcgttcgtaatatgcctacagcagctcatacgaaagaaatgttagatgaagcaattcttaagtatgaaaaagtaggaaaagaaatgggcatcatttaagtaacgacatcttttgaatagcttgcaaatgaggagtggggaaaatgaaaaaaattctagtaaccggttctttagggcaaattggttctgaactagtaatgaaacttcgtgatgtatacggcgcatcaaatgttattgcaacagatattcgtgaaacagatagtgaagtagtaacgtctggtccatttgaaacgttagatgtaacagatggacaaaaactacatgatatcgcaaagcgtaatgaagtagatacaattattcatttagcagctttactttcagcaacagcagaaaaaaatccgttattcgcatggaacttaaatatgggcggacttgtaaatgcattagaagcagctcgtgaattaaactgtaaattcttcacgccaagttctatcggtgcattcggtccatcgacgccaaaagataatacaccgcaagatacaattcagcgtcctactacgatgtatggggtaaacaaagtggcaggagaattactgtgtgattattatcatcaaaaatttggcgtagatacgcgcggtgtccgtttcccaggtttaatttcttacgtagctcctccaggaggcggaacgactgattatgcagttgaaatttattatgaggcaattaaaaaaggtgcatacacctcatacattgctgaaggaacgtacatggacatgatgtatatgcctgatgctttacaagcgatcatttcattaatggaagctgatccaagtaagctagtgcatagaaatgcatttaacattacagcaatgagcttcgagccagagcaaattgcagcgtcaattcgtaaacacattccgacgtttacaatggattatgcagtagatccagctcgtcaaacaatcgctgatagctggccaaactctattgacgcaactgcagcaatgaaagagtggggctttaaagcagaatacgatttagacaaaatgacaactgacatgctggctaagttaaaaaaaaagctcacagctgagttagtgatgaattaataggaagagtcgattcttaggaatcggctcttcattatttttgggaggagagaagtcttatgcaaagagttgatgtcgtatacgcactaatacatgacgaagaaacagataaaatattaatggtacataatgtagaacaaaacgtttggtcattgccaggtggggctgtggaaaaaggtgaaatattagaggaagcactaataagagaagtgaaagaagagacaggtttaaccgccttggctggggggcttgttgcgatcaatgaaaaattctttgaagaatcagggaatcatgcactattttttacattccgagcgaatgtagtaaaaggggaacttattgcggaagatgaaggtgaaatttctgcaatagagtgggtagatcgaacaattgcgaatgagcgtttcccatactatgacggaggatttgaatctttattagaagtagccattccatacaagtttcaaccagaaacaaagtaattgaacgaaaaaacaggagccataaggctcctattttctattcaatcgtcttcagtaatagttttttcagcaatggtttaatcttcaatcgtaaatcttcagcatgatttgcaactaagaagtgatggttataaatgtttttcatcaattgataagttgcttctttcgcttcgccttcttcgatgaagataccgattacttccataccacttttacgcgcgagtttaacagcttcatgcgtatctaaaattccgtcttgttgatagtctagcgcagaaggctcaccgtctgtgaagactagtaagaatttatgtttctcaggtcttttggcaagtttttcagaaacgatacgaataatatatccgtcgcggttatcttcttcttcacgaagttgcataatttctggaccaacgtttggcaacgttgagtttttataatttacaacttcatggataacgttcggcttatcttcaggtttagcgctagaggcatcttcccaaaatccgctaatagcgtgcgggatttttaaagactttaaagcttcatgaaatagtacaacactcttcttcgtttcttccattttgttatacatagaaccagaacagtcaactaatagttggaatgcaacatcgagttcttgtgactcttgtccttttttataaaacatacgcggttgtttttcggtataaatacgaaggaatttcttacgaagtcttccgtaatatttatcactattcgcattcgttttattttcaattgttttttcgataattttctttaattcttttacatctttattgacgactgatttgatagcttggtaatcttttttctcatctgagtttggtttgcgagcttctttaaatgtatgagaagcacctacattatacttaccgtatgcaccgtcgtgctggctagaagcgtgtgaagcccttgcttcttctgtatcagcgccatcaaagttggattgtgtacttttttgtgaggtaccttgtacagaaccaagtgcttggtcgccatcttctgattcacgggcagtatcacccatcatattagtttttgttccgctttctaattcaaagcgtaaaaagttctcgttttcgttatttttattttcacgatgccatgtggagaaactttcatccattttgtttttattttcatcgtcatctataagctgcgtatcatcatttgctaaatcttcgacgcgacagttcttttcgtctgcaaggacagataagtaaagtggagcatgtccgaaatagttgttaagcatatcgctttcaagaagcgcctctaagcgatagcgaattttctcaacgatatacataatatcttcagtattacgtgcttggaatgtttcatgtaaaatcgcttcaatttgctcaaaatattcattattaaacatttcgtatttatcgctagttaatgaaagatagcataggcaaaatagacgatcaccgtgataattacgaacacggtttatttcattttgagagccgaaataattgcggtacatttcttttcgacgtttaaaaacatgcttcgtgccaggacgtaagttctttacgatttcctcaacgcgtaaatcttctaatagaacaaataattgtgttaaaaacttttttaggggcgattcttgcaattcaatcgcataagagcgaattaaagtcatgtccgagtaatgtttattaccaagtgcttttaagaacacttcgctttttaatccgattactgtatcttcttcttttcgatcatcccaaaagtgactaatgacaactttcttttcaatttcgtcgtagtatgctttatagccatattcaagataggcatcgtcttcttttagaagggcatacattaagttttccatttgtagaaacagcgacgcatcaatttttttgtcactaaaaatttgtctcataaattatccctcaaagaaataactttctgctaattcacggacagtcatttgttctgtttcatcattaagttttgcaattatgcttcgttcaatcgctcgcataacaggaatatatacacctaaatcacatgcgtcgataataccacgaatacttgctgcttcttcacttacacgtccatcgcgagctaaaggcataaggtcgcttgcaaatgcaacaaacttttcaattgttgcaacatcatttaattttgattctgctaataatagttcttttaatgtatcaccttgaatgtaaggaacttcaataataacgaaacggttttttaacgcttcatttagttcacttgttccaacgtaaccttcgttaatcgcagcaattacacggtattcgtcatcaccgtatacaacctcttgtgtaaatgggtttgtaatcattttacggtaatctaatgcgccgtgaagaagtggtaacgtttcaggttttgccatattgatttcgtcaatatataggaagtgaccgttcttcattgctttcataagaggaccgttaacgaatgaaacttcagatgcaccatctttcgtttgtagtgtgttgtatcctaaaataccctctacatctaagtcgacagagcagttaatgctatgcattggtttttggaataaagaagaaagagtttccgctagtactgttttaccactaccagtcggtccttttaatagaatattcttgccaagaagaagtgctgtaatcgcatcttcaataatgctattatcagacgctttatatattttcgttccgattaaatgtgcattttcaccagcttcttgtttattcttttcatgaatcgtagaaagctgttgttttaaatcagcatgtatatgaaattgttctaacatgtatttcccacctaacattattttcataaagtaatacatcttatgataacttgttttaatatggtatgcaaagaaaaggaaggaggataaagggaaaagaaaaagcaatcaagatgaagttgattgcctacagtaaaggagaaatgagcctcatgaaagactccaatatgcgtttttttatacttcttttttggaaagagttccatttaatttcagttgaatgtttaaaatcttcttcaaaatcacgtttaatgtcgtgaactgtttttgattcataaagaacgctaataatttcgtaattcaattcaaagctacgtacatccatgttcgctgttccaatagttgcaattgtatcatcaacgagtacaatttttgcatgcataaaaccatctttataactgtaaatagaagcaccagcttttaaaagcggagtgaaataggattgagatgcttgatcactaatgatgctatcacttttacctggatataaaatccgtacatctattccggcaattgcacttaagcgtaataatgttaaagtttcttgatctggaataaagtagggtgtagcgatccaaatggatttttttgcagagcccataacagctaataatgtattacgaatacttttatcatcggagcttggtccgcttgctacgatttgaacagcaccttctgcatttgaaatctctttacctgggaagtattgtctattcatgaattgatcccaggaataagtatttaaaccactagaggcatagagccagtcttctagaaagattgcttgtaatttatataatgcttttccttctatttttaaatgactatcacgccaaacaggaaatttcttggaacggccaagatattcatcaccgacattgagtcctccggtaaaaccaatttttccatctacaataacaatttttcgatggttacgataattgacagtttcaagtaaccaagctgaaaaaatagggtcaaattctacaatttcaatcccagcttctttcataggttgcaaaaatcgtcgtcgtaacgtattacttccaaggccatcataaaggaagcgtacaataacaccatcttttgctttttgtattaaagcatctcgaacttttgtaccaatttcatcagatttataaatgtagtattgaatatgtatatgatgctttgcctgctctatagctcgcaaaatctctgaaaatgtttgatctccgtttgttaaaagttttgtagttgttttatctgcggcaggaccacctccaaatttttgtatgacttctgttaaatgtatggaacgttcatttagtgggactgtgagtaataactctagtcttcttccttctaatatttcacggaataattttctttgttcttctgaacgatggagatgtttttttcttctccagcggctgcgtccgaaaatagcgtataaaagcacacctataataggaagaagtgctaatactaaaaaccatgctaacgtactttgtggagatctattttctataaaaataacgaatgaaattccgacaattgtgatggaccatagagcaccgacaaatgtatataacgaaatatacgatgtatttaataggaacagaacgatagatacaattgtaaatattaatagtaattgaacgataggcttcttcatttctatataattcccctaatcttttttcaatatagacttcttaaatagaagatgtaatatgacatctttattataaggtgttttgctttttttacaaaatatagacatttcacctatactttccgcatttgtcctacatacagtgtactatcccattttttatcccactcttaacgcatatgaaaatgaaaaaatcgaaaaggagcggagaaacatgaattatatagaaaataatggattgtactatcgaaatcatcatcatggtggacatcatcaccatggaggacacaatcactatgatcaccatcatcatcacggaggcggatggggctggggtggtggtagttcatggggaggcggatttttccctggaagctttgcaggaggagtgttaggcggactgacagctggtgcattaacaggtgcaacaagtggaggatattatccggctccatatccagtagcttatccatcaccataccctgtaacgtatccaatgccatacccaggttatcagcaaataccatattcgtattaaactaaaaaagaggctatcctcttttttagtttaatacagtatttatttataaaataattccaaagttaaggtggaaatatgttaatattttgttattgtaattcaaaaacatgcacattaatgtagattttcatattattatttgtgaatagttatgtagtatgatctaatttctatttcgttattaaaaacaaagagatcagatatgagtggtattagttggaaacaaggcttgcatagagctacttaaaaggattgcggtataataaggcgcgaagtaattagagatatgggaagctaccagttataattgaaacggtataatattgctttttattacaaataatattatgttattttaatcggtttatttaaaaagataatttatgtaaagggctagtattagaaaatgaaatatctctatttctatgaagagaaacaggttgtgttttagtcagatagaagcaaggagagatgcgcatgctagaacagagaggtcatgcattatatgactcttcgttgcgagatttaaagttagcattagatgagtcttcaattgttgcaattacagatcgaaaaggtcttattacatatgtaaatgataaattttgtgaaatctctaaatacaaaagagaagaattaattggaaaagatcaccgtattttaaattcaggtcatcatccgaaaaccttttttcaaaacttatggaaacgtattttgaatgggaaagtatggacaggtgagattcggaatcgagcaaaagatggtacatattattgggtcaaaacaacaattgttccatttttaaatgaaaaaggagagccttaccagtttatcgcaatacgaaatgatattagtagtagaaaagaagcggaacagaggttgcggctaagtgaaagtcgttatagggaacttgcctatcatgatgctttaacgagtttgccgaaccgtttgcaattaataacgaccgttaataaattgattgcagataaaaaagaatttggtatgatttactttgatttggaccgttttaaattagtaaatgatacgttaggtcatatgataggggacttacttttaagcgaagtcgcttcaaggttgcattatgtactaggagagaaagatgttctggctaggctaggtggcgacgaatttgtgctgttaacaaaaaatcatagacaagatgatatgaggcagttagcgacatctgtgttgtcatgtttccaggcaccatttattcttgaaggccatgaagtatatatttcagctagtctaggactttgttcttatccacaagacggacaagacgtggaaacattattgaaaaactccgacttagctatgtatagtgcaaaagaacaggggagaaatgctgcatgtttctttacagatgagctacgcgcgaaaataaatcgtagaatgaaagttgagtttgctttgcaaaaggcaattcgtgatgaagagttagatgtagtattgcagcctattattgatttgaaaacgaagagatattctggtatagaagctctagtacgctgtatgacagaagacggacctatttcaccaaacgaatttatcccggtagctgaagagtctggacttattataaagctaggagactgggtattagaaaaatcgtgccgattgtttaaaacattgcccaattatcaagaaggactaaagttatcagtgaatttatctatacaacaattaatgcagaaacgttttattttctctgtacgtagcattttaaagagaactggttttcctccgaaccgtttaatattagaaataacggaaagcatagcagtccgccattttgattatattattgctacattacaagaattaagaaatatgggtgttttaattgctttggatgatttcggaactggctattcttccttatattatttaaaacaactaccactggatattgtaaaaattgatcgtaattttattcgtgaatttcattatgatcacgcacaaccagaacgaacgattgtaaaatccgttattgaaattgctcatagtttaaatttagcagtagttgctgaaggagtagaaacagtagagcaagagagtttgttacaatcaatgagctgtgattatgtacagggattttattatgcgaaacctttatctgtaggagagctaaaagaaaagttaattacagatttttaataaaaaagagaagccagcagcttctctttatttaatccgttttttgtgagtctttcattagtattggataaagaataagacctaatacgaacaatccaattcctaagaagaatgtttttaaatcagcagttcccgttttgataacccaaatagagtataccaacgctaatgtcgtaatgattccatcttttactcgagatccgggcagtatatcatacgtttctcctgtaataactaattttaattggtacaaggtagaaacaaggtatggaattaaataggctaatgttgctacgacgatagcgaaactatacgcttctgaaacagtaccagaaatcgttgaaaataagaaaatttgcgtcattatatttgtaatcaatagtgattttgaaggactaccttttttatttgttttcccgaaaaacttagggaaaagtccattttttgctgcctggtaaggtacttctgaactaacaacaatccagccaactgtagatccaaataaagatataagagcgagtaaagccattatatatgcacctttatttccaattgctaaatttaatgcgtctactaatggtttttgagactcttttaaagcatcttgcggaagagctcccattgtaagtaaagtaattgacatgtaaataagaagagcgataattaatccgaaaatcgtagctttttttacatcgcgctgtgattttgcacgattagaaagcataactgctgattcaataccgataaatgcccagagtgttgcaatagcagctgaattgatttggccacctaatgagattgattgtcctgcttcattcataaaggtttgaccgtctccgaaattagaggcgttgaaaatgaacaatgtaattacaataaacattgtaaatccaataatttttgcaatagtagcaagtagattcatatttccagctcgatcaatattttgcgaaagaatatattgaattccccacagcataaggctacatacgaggaaagttaatccttttccgagctccagtgaaaatccatttattgaaaaaagaatttgcttactttgtaaaactggaaagaatgttgataaatatccagcaaaggaaataataacagatgctgttgcagcccagttagcagcccaatatccccatgccatactatatcctgcaactttaccagctttttttgaaggaaacatcgcttgagcatagctttgtggtccagcttttaattctggtttccgaatcgctaaatttccaaatacaagtgcaatcataaatacgccaaggcctgtaatactccatgcgagtgtagaacccattggacctgatacttgtgctaaatttgctggaagcataaatacgccaccgccaaccatattcccgataacaaatgctgttaaaacccataatccccactttttcgtttccatttttgttaactcctttgtagtaagttttgcttaaacatcattttttactagctttttgacaataaaaaaagagccatgtagataaaaaaatacctacatggctcttttgccaaagcgtaggtacaacgggaataacccttgtacctacgcgtaatttttccgctaggtttcaagggttacgtatgatgatgatgtttttgtgcaaatgtaactacagttgttgtataagtaagcatagttctttgctccctttctcctctgattttgaagttagtatactacatgtttttttgaatgaaaagaaaaatataaaaatttttataaaaatacgttttaaagattaaatatttacctatatttttcttgtactggaaaataagtgagagattggcagaagagtgaagcatgttataatacatatagaattagaaggtgacaaggggctagtgtagatgatgagtaagtatgaacaaatttatacagaaatcagtaaatctattgataataaacaattaaaagagggatgcaaaatcccatcagaaacagaattaatgaagcagtatgaggcaagccgaggaacggtaagaaaagctgtagatttactgcaagagcgtggatatgtgcaaaaaattcatggaaaaggtgtttttgttttaaagcgaaaaaatattgaatttaattttggcggtattgtaagtttccaagaagaaaatgaacgtttaggacgtcattgtattacagaagttgtggaaatggacaaagaaaaagccacaaaagaaattgcaaaattattaaatgtaaaagaaaaaacagagattgaccatattaaacgtgtacgaaatattgatggagaaaaagtaattttagatataaatcattttgtatctgagtttgttccaggattaacgaaagaaattgcaactgcatcgatttataaatacatcgagaaagagcttgggctacatattagttattcgcagagagtaattgaagtacagccatgtacagaggacgatagaaagtacttagatttaaatggaacagactatgttgtcgttgtgaaaaactttacacatttgtatgatggaagtcagtttgaatatacagaatcacgccatcgtttagatatttttcacttttcggatgtggcacgcaggaagtaaagaggtggaacaaaatattgtttcatctcttttttttataaaaaaaaaacataaactcgtatatacgagtgttgactaacttatatatacgagttaatatgtaattgtaaacggtatcaaaaaaagaaaagagggacgggaatatggggaaagactatcgtaaaacagcagaggaagtgttgcagtatattggtgggaaagacaatattgaacaagctgcacattgtgtgacgaggctccgtatcgctttaaaagatgaaagcaaaatagataatgataaattacagtctgtttcattagtgaaaggagcgtttcataacgctgggatatttcaaattgtaattggtccaggggatgtagatcgtgtttacgctgagttgataacgcttgcaggtatgaaagaatcgactgtagctgacgtaaaagactctggaaatcagaagttaaatccagctcaaaagtttgtgaaaatattttcggatgtatttatgccgatattaccagcgatcgtaacagctggtttactaatgggtattaacaatctattaggcgcaaaggacttattttttgatggaaaaaatttattagatgtttatccgaacttaggcgggctttgggatttaattaatatgatggccaatacagcattcgtattcttaccagcacttgtcggttggtcagcaacgaagcgttttggtggtagtccaatactagggattgttatgggattaatgcttgtgcacccggccttattaaacgcttgggactatggaaaagcagcgactggtttagagggtcaaaagattgagtacttcaatattttaggactgttccaaattgagaaggtaggatatcaaggacaaattttacctgttttagtagcagcatttgtattaagtaaagtggaaattttcttaaagaaacatgtaccaaatgcaattcaattactagttgtaccaattacaacaatcgttgtgacaggtgtgttagcgttaggaattatcggtccggttacacgtcatattggagatttattaacagtaggattagtaggtgtatatgaaacagtaccagtagttggagcagtattatttggagcgttatatgcaccgctcgtaattacaggtatgcatcatatgtttattgcaattgatttacaattgattgcacaacatggcggtacatttatttggccgatgattgctctttctaacattgcgcaaggtagtgcggcacttgcgatgttctggatttctaaaaatcaaaatgataaaagtatggcatcaacatcagccatttcagcatacttcggtattacagaaccagcgatgtttggtgtgaatttacgaaataagttcccgttttatgcagcgattatagggtctgctgtggcagcgatattcattacattaaatggtgtattagcacctgctatcggaattgggggattgccagcatttatttctatcattccgaaatcgattccaatgtttattgtcggaatgattattgcagttgtaatcccatttactttaacatggttatttgcaaaaagagtgaaacagaagtaggaggaagttaaacatgaaggattggcataaaagtgtagtatatcaaatttatccgaagagctttaatagttattacaatagagaaaccggtgatataaaaggggttacagagaaactagattatttaaaagaactcggagtggattatatttggttaacaccgatataccaatcaccacaaaatgataatggatatgatgtaagtgattattacagcattgatccatcttacggaacgatggaagagtttgaagaacttttagcagaagcgaaagtacgtaacattgaaattatgcttgatattgttgtaaatcatagttcgactgaacataagtggtttaaagaagcgaaggaagataaaaatagtccatatcgtaattactatatttggcgtgatgaaaaaaataattggcagtctaagtttggtggatctgcttggaaatatgatgagaagacggagcaatattatttacatctatttgatgaaacacaagctgatttaaattgggaaaatgaaaaactgcgtgaagaagtatatgatatgatgcgcttttggctggataaaggggtaacgggattccgattagatgtcattaacttaatttcaaaagaccaatgttttttaaacgatgaaggtagtactgcgacaagtgatggacgcaagtattatacagatggcccgcgtgttcatgaatatttacaagagatgaaccgaaatgtttttgcaggaaaagatgtcattacagttggagaaatgtcatctacgacaattgataattgtattaaatattctaatcctgagcgtaatgaattaagcatgacgtttagtttccatcatttaaaagtagattatccgaatggtgataagtggacgaaagcagagtttgattttattaaattaaaagagattatgtctaactggcaaattgaaatgcaaaagggcggaggatggaatgcgttattttggtgtaatcatgaccagcctcgcatcgtgtcacgctttggtgatgatggaaagtaccgaaacgaatctgcaaaaatgttagcgacagccatgcacatgctgcaaggaacgccttatatttatcaaggggaagaaatcggtatgacgaatcctaaatttgagtccatcgagcaatatcgtgatgtagaatcgttaaatatatacgatataaagctaaaagaagggctatcaaaagaagagattatagggattttaaagcaaaaatctcgtgacaactctcgcactccgatgcagtggaatgaagagatgaacagtggttttacaacaagtacaccttggatttcagcggctgaaaattttaaagaaataaacgtagagaaggcattagaagataaagagtccgtattttatcattataaaaagttaatagagcttagaaaaacgtatgatgtaattacagaaggagaatatgctattttggataaaaatgatcctaaaatttgggcatatactcgtactaaagaaagtgaagtgctacttgttataaataacttctatggagaagaaataacgtattcagtaccagcgcacgttcagttagatggaatgaaacaagaagtactactgtcgaattataaagatgccagcaaggatattgcaaaacttaacttaagaccatatgaatcaattgtgtatcgatatacgaaataaaaaggttgtatgcccgagcggcatacaacctttttattttaagacaccactatacaaaatgcttacttctacttcaggtttgaattttacttttgcataatctttattccaattttttttcttccataagttaggatgataagcgataagatgtcttccaataccgaaagcatcacaatttgctttttgtagttttcgtgttatttttttcgcttctttcgtgagttgtttagaaagttctttatttagtttttctctatcgtccattgtatacatattatctcttggagattcaagtgctataacttttaattggagcttaatgtgagcataaacatttccttttttatctgttgttatttttaagtcgcgttttaattttcgattactaatttccattgttaaataatcagatgtcttctcagattcatcactagtcagtttttgggttatacgggcacttgttcccatttttccggttaataacacgaataaaacagattgttgcaaaggtaaatgcccagttaatttatcattgttaaataaagctaacccgtttgtaactacttcttttccttttatttttatagaaggaagggtaaagtctttaccgggatctaacatttttgtagcagctgtttctaaagtttcttttggaaatacactcatatcttctaagcttttcacttttttctttagaaaatctccaattagtaaatttcctattttctttttttcgagtatctccgatgtttcaccatctactgcaataagttttactaaagcagttgggtttgttggatctcgaaagctgacatctaaataggggagtatacccttttttagaattttggttccgagtaattgaacaccatatttaaaatagcgaatattcccagtcacatttttttttagggcatcgcctgtatccattatgttatgcccggttgctgaatatatttcattctcaaatgaagattgctctccgcttgaactttttacaagctcgattgtttgctggagtttattctcttccgtaatatcagctccaacgctataagctaaacttgcctcccttaatggttcttgatcccaacagccagaaaggagggaactagtacataatattaaaagtaatttaactctttttgggaacatactgttctcctttcttctttcttattattgaataaagtagaaataaaagagggaggacaacgatgaaaatataggtgaacttatcagtgaaagttgaaattacttttaattcttcaggtgtatctataaataaggctacactaaaagcaataataccaacgattggaacagcctttttatgattagcaaggttgaatatatgtccaattccgattgaagcagcgcagtaataactagcaatagaagcgacaactgttatcatccaaattgggatgaagattaggtccgttcgatctataattccaatatgcaaggagcgtaataagtaagcaactggctctggaataagctcaatttgctttggactaaatacgataaagcaaatccaaacggtaaaagtataaaaaagagttacaaatccattggcgatagaaatggccttcagttttgcaatagaactcccatttacttttgggaaagcgataagaataatttcaaaaccatacatggctgtaattgtttccttggatgcttgaattatattccaccatccggcttctgtaataggaaaaatataagagaaatcagctcgtgaaagccctagggcaattaaaagggccattggaataatgagaatagaggccatgacataaaatcgtacgatgactttaaatgtgttataagctacataacaacaagctactgtacataatatgagaattgcagaccacggagttgcgtgtaaaacccatactttaatgacgttacaagcattcaacataaccgtcataccgataagggtaaaataaaaaacataagaaaagcccaatagttttcctaacttattaccaaatagcatacaaacacttttatacatatctgcatcaggaaatcgttttaagaaaagccacataagtaaaataataagttgaatggcaagccccgcgatgagcgcagaaatccaaccaccaccttttgctatcggatgaagccggttaggtagagatagtataccgaccccaatttggcattgaataacgaaaaaggtaaattgaacaagtgaaattttactttgcgtgtttgtcaccgtcctcatcctctctcgttacatgttggcgctgcatttttttcggttttggatcatgtggtctttcccaaaatgaccaaattggtagtcttatgaaagaatctttcatatctttaatccgcatcggggcaacaggagaaagatatggtgtatgaaatgaatgaagctgacataagtgaacgaaagttataatgagaccgaatgatattcctacatatccgaatatggcagcaaggagcattaatggaaaacgaagaatccgaactgctgaactcatatcgtttgatggaacgagaaaagatgagattgcagttaaagctacaacgatgatcattgtgtaagaaacgagtccagcttttacaattgcatccccaattactaaaccacctacaataccgattgtttgtccaacgcggctcggcaagcgaataccagcttctcgtaataactcgaaaattaactccattaagagagcttcaaaaataggaggaagcggtactttctctaatgaagctttaatcgtatacacaagttcgagcggtaacacatcaggatgaaaagcaacagttgcaatatataaagctggtaagagaaaggcaattaaaaaacttactaagcgaatcattcggacgaaagaaccgacaatccaacggttattataatcatctggtgattgatagaaagcaaataacgtaacaggaacgatgagcgctgttggatctccatcagataaaatagcaacacgcccttccattaaattagcaacagttctatctggacgctctgtatttaattgctgcggaaatggggagaaagacgtatcctctataaattcttgtatgtatcctggtggcataagtgcatccgttttaatggtttccaatcttcttttcacttctataactaaatcgtcattcgctatattttgcatataagtaattgccactttcgtgtgcatttcttcaccgagtgtaaaatacttaacaactaaatttggactcttaatgagtttacgaatagaggttaaattagttgctagatcctctacaaaaccagtatgtggaccgcgcacaactccttcattatcaggctctgctatatctctctttaaagataaggttgtttcgaaaatacaaaaactgtcgacgtgttcatgaaaatataaggatttaccttgtaataaaagttgtatcccataatttaaattcgtttcttttttcatatttaacgtagaaaaagctttatctaaagataaagctgatcgcgttaataatggctcaaggactaactgatgaattagatttggatctgctaaagattcgatatataagattgctccttttccgttttgaaaagggagatctaatttttttatatcatcagaatgagaaagtttattttcaatgtaattaatgttctccggaagtgatggaaacatatgcttttggtttttactctcttgttgttctttttgctctgtcataatttccacctctcttaaagtgcaattgtttctgttaatttttgtcgtttgtgagaaatttatgcttgaattattttaaaaaaagaggattgaaggttacgttacattgtcttttgtgcattattcaatttcatagcagtacttctaacatttgtgtcgaattaagaagatatataggagggatacatatggaaatagctgtagaacgtgtttttacaaaagagattttaaaaagagcagcgagtttgtttcatgtaacagtggaagaaaagccacttggagattttgaaaattatatttttaaggcaaagggtgattgtggcgaagattacgtattgcgtttaactcactcttctcatcgctccaaaaaagaggtagaggctgaactagattttttacgatatgttgcggagaatggggcaaaggtagcaggacctctttattcaacgtctcaaaatcttgtagaagaaatcgtagcagaggatgaaactttctttttcgcttccttatttacatatgcaaaaggtgagcaagtaaaaggagaggaatcgccttattggggcgagcctctctttgaagcatggggaaaagcgattgggcaactgcatcgccttacaatggaatatcctaaaacagactatcgtgatacgtgggaagaagacgagagtgggattgttaatgaactagaagatgatcaagtgaaaaaaatcgctgcggtattaatggatgagataaaggctctttcaattgaaagagaaacgttcggccttatgcacggggatattcatccaggtaattttcattatgatggtaaagagttaacaatctttgattttgatgatgcagcttataattactttatacatgatttagcgatggttctttattactctgttctatttacaccgtggacagcagaagagaagacagattttgctcgtaaacagttacaagtgttacgaaaaggatatgagtatgagcacaggctggcggatagttggtatgaatcgttgccactatttttacgtttacgtgatataggtttatatggaacgcttcagaagaagtttaaagggaaagatatgcctgataacttcttgaaattatcagaagagctatacgaaagaattattaaaagagaagcaattgtgaatatataatacatttagttcaaaacaaagtatataaaacaaatatatactttgtttttttatacaaaaatatgtttactttattaaaataatattgtcctagattcggtatgcacttataattttatatatattctgaatattctttataaagaaggagggggaatgttgggaactttcgtaaattggttaaataatattgtttggagtccagcacttgtttatttatgtttaggagtaggtttatatttttctattcgaacgaagtttttacaagtaaggcacgtaggagaaatggtgaagctgacatttcaaggagaaaaatcagaggctggtgtttcttcattccaagcgttagcactttcgttatcaggacgtgttggaacagggaatatcgctggggtagcaacagcggttgcattcggtggaccaggagctgtattttggatgtgggcagtagcctttttaggggcaggatcagcttatgtagaatcaacactcgcgcaaatatataagacgaaacatcaagggcagtttcgtggtggacctgcttattacatcgaaaaaggtctaggagttaaatggtatgctttagtattcgttgcagcgacaattcttgcaacaggacttttactaccaggcgtacaagcaaatagtattgctgtaagtttagaaacggcttttggtattaatactaccgcatcaggggctatattagttgtcgtattagctcttatcattttcggtggagtaaagcgaattgttaacgtagcgcaagttgtcgtaccttttatggcaataggctatattttagtagcttgcgtcattgttgctatgaatattgaaaaattgccagaagcatttatgttaattataagaagtgcatttgcattagaagctgctttcggtggtattatcggtttagcaatctcttggggggtaaaacgtggtatttattccaatgaagcaggacaagggactggaccacacgcagcagcagcagccgaagtatcacatccagctaagcaaggtttagtgcaagcattttccgtttacattgatacattatttgtttgttcagcaacagcatttatgatgattattacaggcatgtataacgtatttgatgcaagcggaaaaaactttatcgttaataaactaaatggtgctcagccaggaccaggatatacacaggcggcggtagaatctgttttccctggatttggaaacggtttcgttgcaatctcgttattattcttcgcgtttacaacaattatggcgtattactacattgcagaaacgaatattgcgtacttaaatcgtgataaagaccgtccttggatgtctatggtactaaagtttgtatttttaggagctgtattctatggatgtataaaaacagcagcaacggcttgggctttaggcgacattggggtaggaattatggcatgggtaaatatcattgcgattttactattacaaaaacctgcattagtcgcattaaaggattatgaaaaacagaaaaaagaaggaaaagatccagtattcgatccaaggccattaggaattaaaaatgctgatttttgggagcatgaatacgggaaagataagaaagaagaagtatcttaacagaatagaaatgaagaagcaaaggggaaactctttgcttttttttatggacaaattgaagctaaaagttatttttgggactatttttgaatataaaaagaatgtacatgcattgttaggggaagggggagtatgttgatagaatttcgtaatgtaaataaatattatggtaactttcaagttttgaaaaatattaatgtgcaagtgaaaaaaggcgaagtggtagtagttgtcgggccttcaggatcaggaaaaagtacattgcttcgatgtataaatcaattagaggcaattacagatggagaattaattgtacaaaatacagaggtacacaataaaaaaacggacatgaatgaattgcggcgaaatattgggatggtctttcaacatttttatttatatccacataaaacggttcttcaaaatattacattagcaccgattaaagtaaataaagtttccaaagaagaagcagagaaaacagcaatgttttatttagagaaagtaggaatcccggagaaggctaacgtatatccacatcaattatccggaggacaacagcaacgggtggcaattgctagaggacttgcaatgcagccggaaattatgctattcgatgagcctacgtctgctcttgatccagagatgattggagaggtacttgatgttatgaaagcactggctaaagaagggatgacaatggtcgttgtcacgcatgaaatgggatttgctagagaggtagcagataggatcttatttatggatgatggtcaaattattgaagatacaacaccggcgcacttttttgtaaaccctgaacaagaaagagctcgtttatttttaagtcgggtgctaaatcattagaggaggaatttcatgcttaaaatgaaaaaattatttactttaatcgtattttcatgtttattcgtgcttgttgttgctggttgcggaagtaagaaagatgaggcaaaggaaacaaatacgaagcaaggcggggctgttgagcaaattaagaaacgagggaaattagtagttggggtgaagaatgatacgaatttatttggattaaaaaatccttcaacagggcaggtagaaggattcgatgttgatgtcgcgaaggcacttgcgaaaaagattcttggagatgaaaagaagctagagctgaaagaagtaacgtctaaaacacgtattccaatgctgaaaaatggtgatattgatgcaattattgcaacaatgacaattacggaagaacgcaaaaaagaagtggatttttcagatgtatattttaaagcaggacaatcgttacttgtgaaaaaaggaagcaatattaagagtgtcgatgatataaaacaaggcgttaaagtattagctgtaaaaggatcaacatctacaaataacattcgtcaaaagtcaccagaagcgactgtattagagtttgaaaattatagtgaggcatttacagcgttaaaggcaggtaaaggtgatgtgttaacgacagataatgcgatcctttacggaatggcaaaacaagattctaattatgaagtagtaggaaaaattttcacagatgaaccatacggaattgcagtgcaaaaaggggcagatgatttaacgaaagagattaatactttaattaaagacatgaaagcaagcggggagtatgacaaattatatgagaagtggattggacaaaaaccagaaaagtagatagtaaaagtgagaggatgagagtgctcatcctcttcttgtaaagaaagaggggagaatatgtgcctgatttttctatattaacgaataacattgatatgtatttagaaggatttaaatatacagttatgtctagtgtaattgcattgataggcagttttattttaggagtaattttggcagtaatgcgtattgcacctattcgtattttaaattggataggatcagcttttgtggagtttgtaagaaatattccactcgtattaattgcatttatattctattttgctttacctgtaataggaattactttaaatggttttgtagcaggaacagttacgcttacggtatatacggcagcttttattgcagaagtaattcgcgctggtattttatcagttgcgaaagggcaaatggaagctgcccgctcttcagggctaacgtatgtgcaggcgatgtattatgttgtcttaccccaagcagtgaaaattgtaattccccctttaggaaaccagtttctcaatttagttaaaaactcctcaatacttggaattattgctggtgctgatttaatgtatcaaggagatttaatttcaacgaagacgtttgttacgtttgatgtttatatatttgtcgggatgttttatttaatattaacaattccgctcagtatgctagtgcgttatttagaaaaacgcttggcaaaggaggcggtgtaaatggatttcaagggagcaattacaggagatcatattctatttttattaaaaggattacttataacattagaggtagcgctcatagcaattgtacttagttttattattggaagtgtaatcggtatattgcgctacacgaaaatacctgtcgtctcacaaatattaggagttatagttgaagtgattcgaaacttaccactactgttaattatatttttcacgtattttgcacttccagaagcaggcttgaaattagaaattataacagctgcaattgttgctttaacaatatttgaggcagcaatgatatctgaaattgttagaagtggtttattgtctattgaaaaagggcaggttgaagccgcaagatcttcgggattaacttatgtgcaagcgctttggcatattattttgccacaagcattaaggagaatggttccgccgcttgtcagtcaatttatttcattgctgaaggatacgtcgctagcggttgttatatcactccctgagcttatgcataatgctcaaattattagcgggcaaaatgtgaattacatgattccaacatttatattagtagcttgtatgtactttatcgtaaattatagtttatcaattttatcgagaagattagaacttcgttgactcttacaatatatgtaagggttttttccttgtttctccttattttcctctaaatagaatctaaatcttgcaataattcgatttttatattattttatcagaaaagttttaattttatatagaaaatgtaatcgctttcgtgtatatttttattatcagaaaattttaacaagatataggggtattggtagggggaggatttagatgcagcaaccaacgaatgagaaattacatcgtacgatgaagagtagacatttatttatgatcgcacttggtggtgtaatcggaactggtttcttcttaggttcaggttacaccattaatcaggctggaccagggggagccatcctttcatatttagtaggcggatttattatgtatttaacaatgctttgtcttggagagttaacggtagcaatgccagtttcaggttctttccaaaagtatgcaacgaagtttattggaccaggaacgggctttatgattggctggttatactggcttggctgggcagtaacagtgggtctagaattaacgtcaataggtttaatgatgaaaagatggtttccaaatgttgatgtttgggtatggtgccttgtattcggtgttattttatatgcttcaaacgcaatttcggcaaaaagttatgctgaattagaattttggttttctagtattaaagtagttaccattcttgcctttgttgttcttggtggtagtgcattattagggtttatatcatatgacggaaaagaagcagcacctcttttctctaactttgtaagcgatggtggattatttccgaatggactagctgccgtattacttacgatgattacagttaacttctcgttccaaggaacagagttaatcgggattgcagcgggagaaagtgaaaatccagaaaaaacaattccacgcgcgatccgtaatacagtatggcgcattatgttattcttcattttaacaatgacgattttagtagggttaatttcttggaaagaagctggcgtaattgaaagtccattcgtagtcgtatttgataaaatcggtattccgtatgcagctgatattatgaatttcgttattattacagcgttactatctgtagcgaattcaggattatatgcggcaactcgtatactatggtcacttgcaaatgaaggaatggcaccaaagtctttccaaaaagtaaataaacgtggtattccaattacagcgttagttgtaacaattgctgtagctgctttatctttattaacaagcttccttgcagaagatacagtatacatgtacttattatctatagctggtttatcagctgtttcaagttggatcattattgctttatcgcaacttcgctttagaagtcagtatataaaaggcggaggaaagttagaggacttaaagtatagaacaccactatacccaatcgttccaattttagctttaattacaaatagtatcgttgttattagtttagcgtttattccagaacaaagaatggcgttatactgtggtattccatttatcattttctgctatatatattattatattagtaagaaacggcagaaaccgatgaaagtggagatggaaaaaacaaatgaaactaacaatcaaacacgatgatatagaagcagatttatcgtatggtcaattagcgattggaaaagaaaacggttattcaccgttacaattactcgtttcttctatcgcagggtgtagtgcaattgtctttcgaacgattttagaaaagaaacgtattccatacgatacgtttacaatcgaaactgaaattggtagaagtgaagcgttatcgaagccagttgaaagtgttcatttgcactataaaattaaagcgcaaaatattacagaagagcagctggacaaggcgctgcaacttgcagtgaaaaattgtacgattgttcaatctgtaaaagatagtataaaggttacggaaacaattgaactaataaaatgaaacataaaaacgtgagaatacggctctcacgtttttatgtttttaataaagggggaaatatgatggaatgtttagggtgtaaattagcaggcggagaggaaattatatatataatatatgaagatgattatgtaacttgctttttagatcatgcgcctttctacccaggacatactttaattgtgccaaagcaacatgttgtagaagtagatgaattaaatgatgttgtagcaaaatccgttatggatgcttctaagcttattgcaaaagcgattaagatagtatataaacctgacggagttacagtttgtcaaaatggtggagtatttaacgagttaacacattatcatatgcatgtcgtaccaagatataaagagcgttcgtttgctgagttttatatggtacaaccaggagaaaagcagaatcataacttggaagagacacagaatttgttaaaagaagcgatagagcatatgctgcttactgaaaaggcgtagcggtcaggaaaattctaatattaaaaagcccaatttctcagttaaaatagagaaattgggcttttgtttattctattattaaattttatacataaaaagattttgcagtgtcacaaagtatagcgcttattcgttatatagagtgagaggaggaattatatgaaagttacaaacaacgattatgaaaagatggaagagctatatgagttgtatgaacaaaagatttattatgtagcgtattctattttaaataatattcaacaggctgaagatgcggttcaagagacgtttattactctttataagaacttggaaaagctccatagcttggctactcaagagcttaaacgctacattttgagggtcgcgaaaaacaaggcgattgatagttaccggaaaaacaaacgacatgaaacatttttagaagaatatgaaagagaatctgtagaagcagtagatgaaaatattgaagagtgggaaaaacgtaaaatgtctgaggttcaaattgatgcattgctaaaagagttaaacgaatctaatagacaggtgtttaagtacaaagtcttctataacttaacgtatcaagaaatttcaagtgtcatggggataaccgaggcaaatgtccgcaagcagtttgaacgcgctcgaaaacgagtccaaaatatgataggaggtatacaacatgacgaattcaaagaactccaaagaaatatatgaacttgctgaaaaaattgctttagatgattttgataaacttgaagaacaacatgaattttcacatacatatacgcgcaaaaagaaattgtttatggaggaaatgaagccgcaaaatggacaaccgctgaaaaagcgtaaaagacatcgtatgttaatcgctgctgcttgcttattgatcggcatgccgacaaccgtttttggagcagtaaaggtctataatatgattgttcaaaaacaaaattatgaagtaaatatttcagtaacaaataaggactcgaaaaaggctgataagtggtataagctgaaaatcgataaattaccagaaaatatggaagcaattgatgactctgctatgaaatattcctttaaagataactacgcaatgggtggattttcattcgttctttggagagtaggagggaattcagattttccaactctgtactcgaaaaattatgaagaaaaagagataaatggtaagaaggcagtaattgtccatagagaaaatggtaataaagatttaatgtttaatagagtaatttttctctattttgaggaagaaggaattatgttacaaagttatattggaaatgatataaacgaagaacaaatgatagatgtgctagggagcatttcacttgagcccacgtcaaaagaaaagtcatcatatataagcgattatgataaaaagtattttagccaagaaagtaaaacaactaaggtaattcctttgaagaaggatagcaaacgactatttcatataggacaaaaggttccagtaacgatatctatggataacagccaaattgaatatgtgatagaaaaagttgaagtttttgattcaatcaaagattttaaacaagagaactttaatgaacttggcctagagatattaagcaagaataaggctttagatcagacgggaaaattactatcatacagacgagatgaatataaattagggaatggtaaagattcaattgatacattagtagattcgaaattagttaatgttaaatttgtctacttaacaacaacagtgaaaaatattggcaaaaagtcgacagaagaaatctatatgcatccatccataaaacagcttaaatttgaagggaatgcatggaaatacgctaaagaagaggggatggacgcaacgcgtattatgacaggtgaagttgattatttagaacctcacggagatggaaaaagtttttacaatattggcagtatcacaccaggagaaacggtaaaagttaatttaggttattttgtagatgaagataaattagattcaatctttttggatgctttcaattacagagggattggtgacactgaaaatatgaattcgaaaaatcgttggtggtttgatattcgtcaataataaaacaataggaacaacaggacaaagaagctgcttatatttagcagcttttttcgtcttcatacatatgtaaaacttctttcgcacgcatacgtaaaccatctatcaattctgtcggttctaaaacttttgcatcttttccgagtctataaaataaaggggtaataaaattgatttctcctttatcaattgttgaatgtatatatcctgtcccgttttcgtttgttacaacgaattcttcaaggtaaggcacgcttttacattggcgtacgccttctggtgtcagtaaaacatgtaactgagtagggatgtgtactacgttagagttagaggaaaaccactcttctaaattcatgaatgtatcctcattttctttcgttgataatatagaaagaatacgatcgatgcgatacagtaatacttttttcctgtcatagtcataggacggtaagtaccatagcccgtcatgagcatatacaccgataggatgaacatgttttgtttttatccccgttttagattcgtattgaaagtgtaaatttttattttcaatagccgctgttaacacttcgtttaaaagtggtgtatcaattgttctctttggattccaaaaggcgatataagaacgtattttgtcaactttcgctttcgcatcatgttgtagggagctatatagtttatgtgtaacggaatttatttctgtgttaaaaggtaagtctctgtagtagcttaaagattgaaaggcaaaaaagatggagactgcttcttcttcggtaaataaaataggtggaattactctattcgttaatactttatatcctccgttgcgaccttgttcagcgtaaatgggtaatcccatatcacttaaatctaaaatgtatctatggacagtacgaacagaaatattaaattcatcagctatttcttgcgctgtaaatgcttttttcgcagaagcaaatataagaatatctaataagcgtttagcttttgacaaatgtatcaccttttttctttttaaacatgacataaattgtcgtgttttattgttagtatattgtttacagcataatgttatcaagatgagatgtaaggaggaaaaaatatgtcacgtgaaatagttttatttattgcggcgagcttagatggatatattgcgaaagaagatgatgatttacagtggttaatggaaaccgaaggggagggagataacggttatacagaaatgtacgaaacgattgatacaataattatgggaaaaagaacgtacaattatgtagtagagcatacagaaacattcccgtacttagataaaaaatgttatgttttttctaattcggaaaaaggttcaaacggaaacgtggagtttgtaaatgaagatgtagtagagtttacaaaaaggttaaaatcgcaagaaggatctaaaatatggatggtcggtggagggaatctactgagagaattctttaagaataatctaattgatgaatatgttgtcacgattacccctcacatattaggttctggagttccgttatttcaagataagaatccggaaattaatttaactttaacggatacgaaacgttttgggcaatttgtaaatttatattataaagtaaaatgataaagaaacacgactactgatggtagtcgtgtttctttatagatggcaatgaaatgataaagcaagacccgtaatcgacttcgctcgttacagtaatatttccgtcgtgtagttctacaatttcttttacgatagatagccctaaaccagttccgcctgtagatcgtgttcttgctttatctacacggtaaaagcggtcaaaaatgtgagggaggtcttcaggtggaataccttcgccttcatcttcaattgtaatggagatacgtttatgttcttctgtgatagaaatgtttatatgagaatgttcttttgaatgtctataagcgttatttaaaatgtttactataacttgttcaaatcgctgttcatctaagtttactagcagtgtaggaggacaagagaaagaaactttaatgcatctttctttatacatggcatttactttttcggctatgcgagttaggaatgtgtgtaaatgtacttcctttacttgaatagaaaagttatgttgttccatttgtgcaagtgaaaataaatcttgaactaagtttgtaatgtaatcagactcatcttttataattgataaatatcgcatacgttgttcagaaggggtgctttcttttgaagcaatgtcagcataacctcttacgtatgttaacggtgttcgtaattcgtgagcaacacttgctagaaattcacttcgctctgttttcatataatgtaaatcatttgcgagcgtttgaatagatgatgctagttcaccaatttcatcatttcgagtagtcgttaatgaaacggacaaatcgcctttactcattttttcagttgcatgtttcatgtgtaacaatggttttgttaataaacgtgataataggaaaattgtgatgactgtgagtagaaacgtgatggcgccagcaataatgaattgtttcgttaatccatttaccaacttttcaatggattctgttccaagaaacatatacacatacccttcatgttttccagctactatgataggactaactgtacatatataattagatgttttccagtgattttctataatcgctccgttatggtctgttcgagtctgcatgctactaatgtgattttttatagtcgtgtttatttcgttagatttagctagcacttctttatttgtatttgtaataacgacagttgtttcagcttcagattccattaatgctacgtgagagattgtttgcttatcataatatttttcaagtacatcacgatgactgtttccacgttttaataaagctgtcatttcttcatttactctagtgtttacgagactataatagagcaatacaaatagaacactttcaattaaaagtgtaacaattaaaaaataaaatccgaattgaattgaaattcgtttcatcgttttaccccttactgttcagtatcaatccatcgataacctactccatacacggtttttaaatgatgatcaatagggaaatttgcttttcgcaatttatcacgtaaattacgaatatgcgaatcgactgttcgatcttctgtatttgtatttaatccccaaattcgttcaatgagctgatcgcggcttaatacgtagttcacatgacgtaaaaataatccgagtaaagaaaattcaattggtgtgagaaggagctcttcattatggacagaaacgaagtgttttgtttcatcccatacaataccgtgatattggatttgtttatgttcatttgtacgtcttaaaacggcttcaattcttgcgaaaagttcttcttcatggaaaggtttcgttacgtaatcatcggctccaagttttaatccttgaacgacatctactgtttgatcacgagctgtaaccataataataggaatgttactaaaagatcggatttttttgcacgtttcccatccgtccatctttggcatcataatatcgagtaaaacaaatttaaagtttcgattttctatatgtaaaatagcttcttctcctgaagtcgcacatacgcagttatatccaattggtgtaagataaagcgttaataattcaagcattctcggttcatcgtctacgagcagtatatcaatcatagagagccctccatatttataatcgttacttaaagtgtaatgcaaaatcatgaagaaatggtgcagattatgatgcgtctgcataatttcttcagaattgcttgttattgtggagttgaaattacattttaggtaatcatattggctcaaaaatgattaatacggaggcggtatagtgaaaaaaatgacccgaatttttgggataacaataattacagcagttggtcttactgcatgcggacaaacgaatacagaccataaaaaccatgaatctacaaaagagaagaaaacagagcaaaaggaaatgaaaatgaatcaggaggtaacggcgccaaaagaaatgaacgaaggtgcatctaatgatttattaacgacaagtttaaaaaatgtaacgagattaaacacaaatgaccctttgcaaatggcagtattaacttcgcaaacgatatggccagcaactcataaggagaaccagccaggtgctgttattttagtaccagcaagcgagtggcaattaggtattgcgagtgcagatcttattcatcatccgaataacgggccgattttatttatagaaaaagaaaagataccggaaatgacgttaaaagaaataaaacgattaaatccaatcggaacgaaagatggaacacaaattatggtgatgggagatgtaggtactagcgcgcttgaacaattaaaaggttataaagtaaaacaaataaaagaaacggacccagctatatttgcgaaggatgttgataaggagtatgccgatataacaggaagctatccaaatagtgttattatcggttcgtctgcagaagaaggacgtttatatacaacccccgctgtaaattggatttctcatatgccggaaccactactctatacagaaaagaataaagtgccagaagcgacaatagaggcattaaaaatgagaaaagataaagcaaatatatatgtattagggccagaaaaaattgtttcaaaagaagtagaaaaagagctaagcaaatacgggaaagtaacgcgtattagtggagagacccctacagaaaactcgattgcgttcgctaaatttaaagatgaaaaaacaaaatttggctggggattcacaaaacctggtcacggtttatcatttgtttcaagtaaaacaccagatttagcagttgctggggcacctttttcacatatgggtaaacatgcacctgttgtattattagaagaaggtaaagcttcacaaccagtgtatgacttccttgcaagcattcagccgaagtttaaagatgatccaacacttgaaccatataatcacggtttcttattaggaagtacgagtgatatttcatttgaaacacaaggaatactagatgagaggttagaaattgtttaggaaagtggtcaaggacacggtggacattaataaaatgagcaaagacgctactgatatagcgtctttttctttaggaaacttttacatagtaaaaaatcttctactcgttatataatagccttcgtgcagtcggctagattttcttatggagaaaatcaaatgataaaggagtagaggagtggtattttgtttcaaacgataaaaaatgattggttttctaatgtgagaggggacgtgttatcaggaattgtcgttgctttagcattaatccctgaagcgatagccttctctgttattgcaggcgtggatccaacagttggactatacgcagccttttgtattgcagttaccatttcatttgttggcggaagaactgggatgatttcagctgcaacaggtgcaatggcattattaatggtaacgcttgttaaagatcatggtttcaatcggaacgtttgattggaactctgtaacaacaattcataaagtaccaaaaggaaaggcatttgttatgatcgtaacagttgtgattgtcctaattacacataatttagcattaggtgtaattatcggaacagtaattagtgcggtgttatttgcattcaatatggcaaagattcacgtgaaacatttatatattgaaaataagaaaatatacgaaattcacggtcaacttttctttgtagctacagccgatttcataaataatttttcatttaaagaagatgtaaaaggaattgaaatgaattttactcatgcgcacgtatgggatgattcagcagtggcatcaattgataaagttatcatgaagtatgaacaaagtggtgtgaaagtaactataacaggattaaatgaacgtagttcaaaacttgttgcaaatttagcgacttataataaaagaattgctagttaaaagcctcctttttagggggccttattatataatacgagtaggataacgaaaaggggattcagcatatgtacaaacaaattatattagcatgtgacggttctgaacatgcacttcgagcagcagagcatgcaacatatattgcgaaatgtagcgaagaaacaaatgttgaagttgtgtacgtagtagataatagaacggcaaaatcagatattatacaaggtcaaacagatttagaaacaatatcggctagtcgaaaagataaattaaaagagattgaaggtttattaaagaaagagaacatttcttatacaattacgatattacatggtgatcctggagatacaattgttcaatatgtaaatacaggagatatagatcttgtcattgctggaagtagagggctcaatacactgcaagaaatggtgcttgggagtgtaagtcataaaatagcaaaacgagtgaaatgtccggtgatgattataaaatgaaatagaatgtaacgaagaccttagtataactgaggtctttttttatgtataaatgactcttatttgtggaaatactagatatataagttgaaaagatgttaacttacaaatttgtaagttagttgttagagaaatcgatgttatgagatttttcccattggtaaaataaaagtatcaaaggggagatagggaggatggaagtaatgaaatcatttcaaaatttgtcatatagtcaaggggtaagcttaatttgtctagggggatttgctacatctgttacgttagctgttttaataaaggtgtttcatcaaatcttttaattttatagtagggaaggaattggttgttatcattagtaggaacagcaatgaaaataaaaaatagctcttagcatgtatgtaaatgctaagagctatttttatgcttgttatatgttatttaagcttgcttttgttttactgaccctgtatttaaagtaagagcaaggaagaacattgcaagtacgcaagatgcaagtaataagatgaatccgccatcccatccgaatgcatctacgataaagcccatagctgcactagcgaaagcagctccgcctaagtaaccgaagaatccagttaagcctgctgcagttccagcagctttctttggtgctaagtctagagcgtgtagaccaattaacataaccggtccgtaaattaaaaatccaattgcgacaagtgcgatactatcaaccattggattaccaggagggtttaaccagtaaacaagaactgcgataaatacaccgaccataaatagaataccagcaggtgcacgacgtcctttaaatagtttatcactcatccatccgcaaagaagtgtacctggaataccagcccattcatatagagcgtaagcagtacgtgagctactatgagtaaagcttttttcctctactaaataagtaggagcccagtctacaacgccgtaacgtacgaaatatacgaaaacgttcgcaatagcgatgtaccataaaaacttattgtttaatacgtatttaaataaaatttcctttactgaaagctcgcgttcgcggtcttttactttttcatctggtggatattctccagtatgttcttcaatagaaggtagtccacaagattgaggcgtatctttcatcgtaattaatacataaataccaactaaaattgaaagaatacctgggaagtaaaaaatacttttccagtcatctgcgaagaagtataagcctaatgttacaagtgaaggcataagcgctccgccaacattatgagcgacgttccaaatagacatttttgtaccacgttcgctaatagagaaccagtgaaccatcgtacgaccacaaggaggccatcccataccttgtacccatccatttaaaaactgaagtacaaacataagtataatgctcgttgtaatgaaagaaaatgagccgaaaataatattaatgatacctgataaaaatagcccagctgctaaaaagtagcgaggattacaacgatcggatacgatacccataagaaatttacttaatccgtaagcgatagaaactgctgaaaggataaccccaagttcccctttactaaagccttgctcgattaagtatggcattgctagtgaaaagttttttcgaacaaagtagtaacctgcataaccgatgaagatacctaagaatacttgtaaacgtaatttacggtattcgctatcaacgcgatcagctggtaagcgttccgcgtggggcgcaggtttaaataattgtgtgaaaaacataaaatgaaaatcctcccctaattaattcgaagcgttttaagacagagaacataaaaaggccatgaaatataaaaaagtttccttttttatgattcatagccgtgtactccgtttctccgtgactgtcaatattaacttcgtcgaaaattatacaactttgtgacaaaaatgtaaacgtttttatgaataaaagtattgacggattttgttcgtgggattaatatttaaatacattaaatattttattgtttaaataagaggtggataacatgccaaatgatatgacgcatatcgataaaattcaagctcttgccttttcgattggaaagaaaatgcagacggagttattagaacaaatgcaagcgacaggacttacaccaccgcagttttatattttaaagattttagatcattatggggcttcaagagcgacaacattagcaaaaaagatgtatgtgaagcctagcgcgattacagtgatgattgatcgtctaatcgatcaagaacttgtagaacgctatcacgacaaagatgaccgtcgcgttgtcatcatcgagttaacgaaaaaggggaaagctagagtagaagaggcaatgacagctcgtaacgagcatattgcaaaatacttttcacatttagagttgcaagaaagagaagatttattacgtctctttgagaagttagaaaccattatttgcgggacacaagagaaaaaagagaataactaagaggaattgaggagattacatggagcaacaagaaaatcaaaatagaaagttgttgttaatcggtttagtaatcgcgatgctatttgctgcattagatggaacaattgttggtacagcaatgccacgtatcgtcggtgacctaggcggattaagtttaatgacatggttaacgacagcttatatgttaacatcaacgacagttgtaccaattgcaggtaaattagcggatttacttggtcgtcgtaacgtatatataacagggctagttattttcatgattggttcggcgttatgtggtatggcgaatggtatgacagaattaattattttccgtggtattcaaggtcttggtggcggtattatgatgccaatggctatgattattattggagatatgttcacgggaaaagaacgtgcgaaatggcaaggtatttttggtgcgttatacggtcttgcttctgtaattggaccgcaagttggtggttggattgtagatgcagtgaattggagatgggtattctacattaacttaccggttggtattttagcaacaatctttattgcaatgggattaaaatcgcataaacaaacaggaccaattaaaattgatatcgctggaatctttacgatgattctcggtgttgtaagtttattacttgcgctaacgtttggcggaaaagattatgcatgggattcttggcaaattatcggtttatttgcactagctgtaattggtatcgttagctttgttatcgttgaaacgaaagctgaagagccaattttaccaatgcatttctttaaaaatcgcacatttacaatactgaatgcgattggattctttatgagtattggaatgttcggcgcgattatgttcgtaccattcttcatgcaaggtattgtaggagtaagtgctgctgaatcaggaacaattatgactccaatgatgattacaatgattgtgatgagtattatcggtgggcaacttgtattaaaagttggtgtaaaaccacaaattatcgcaggtatgcttattatggccggtggtttctggttattaacaacgatggatatgcacacaacgaagcttacagctacttcttatatgatggttatcggtttaggaatgggtcttgtaatgccgacattaacattagcgttacaagaaagcttcccgaaaaaagaccttggtgttgtaacatcatcaagtcagttcttccgacaaatcggtggtacatttggtattacaattttaggatcaattatgaataacacttcaggtacgacattaacaaagaatttagtacctgtattagatacattcccgaaagaagcgggacaaatggtaacgaaatttaaagatatgattcacacagatccacaaggtttatattcgatgctatttagcccagaggcattaaaacaaatgccagaagcgttcgctaacagtattgtacctattttgaaaaactctttagtagactcgcttcatactgtattcttaacaggattagtatttatcgtagtaggtgccatctttacgattttcttacaaaaaattaaattatcagatcgtaaaaaagatgctaaagagcctgttgtagaagaaaaagaaaaaactgtatcatactcgtaatgaagaagcatcgccttatggcggtgcttttttgagtataaccttaaaagctttttagtgagaaatgattgacgtatttttagaaatacgttatattattttctgtaaacggttacatgaaatgaggagaaaagagaatgagtacgatcaaagacgttgcgaaattagcgggagtatctgttgcgaccgtttccagagttctaaataaaaatggatatgttcacgaagatacattaaaaaaggtagaacgtgcaattgagatgttagattataagcctagtacagtagcgcgttcactgtataataaaaagtctcgtttaattggcttagttgttccaaatatcgtgaatccattctttccggaagttgcacgtgccgtagaagatgtagcacataaacaaggttacacagttgtcctttgtaactctgatgaaagtttagaaaaagagaaacaatatattgatgtgcttagacaaaataatgtagatggatttattgtagcaacgaatccacaaaatagtgttaattacatgaatgtatctgttccagttgttgcgattgaccgtatgtttaatgagcgtattcctactgtatatgcagataactatgcaggaagtcaggctgcgacaaagttgttactagataaaggatgtaaacatattgcacatattcgcggtccacgtgatgtgagtactgcaaatgaacgctttgaaggttttgtagacgttattacgcaaaataatctttcgtatatgattgcagagagtacgtttgatccagcaaatagtgagcttgtagcgatggaattattagaagaatacccgcatattgatggtattgttgctgggaatgatttaattgcgatcggtattgtaaaggctgcacttcaaaaggggattgtcattccaaatgatttacaaattatcggatttgatggcatttctttaacggaaatgatgtatccatctattacaacagttgcacaaccgatatatgaaatggggaaaattgcaacagagttgttgttagagcaaatggaaggaaatacattagaagagaaacattatcgtttgccgattgaaattatagaacgaaatacaacgaagtaaggagatgaaacagatgccaaatattgcagtagtagggagcatttcaatggacttagtggctgtttcaaaaaaacggccgaaagcaggagaaacagtaattggtgaagcgtttcatacaattccaggagggaaaggagcaaaccaagcagttgctgcagctagattaggagcaaatgtagcaatggttggagcggtaggaaatgatgattatggaacagtagttagaaaaaatctagagaacgaacgcatttttatcgattatgtggtaccggttacagatagaacgacaggaattgctcatatcgttttagcagaagaagataacagtattgttgtcgtacaaggggcaaatgctcttgtaaataagtcagttgtagatcgctccaaagaacttcttgtaaaagcggatatggttgttcttcaactagaaattccacttgaaacagtaaaatatgtattggctatttgtgaggaacataatattcctgttatgttaaatccagcgccagcacaagttttatcagaagacattttagaaaaggcaacttatattacgccaaatgaacatgagtgccgcatcgtattagatgatttcatctcaccaattgaagatttattggcgaagtatccaaataaattattgatgacagaaggttctaacggtgttcgtttccataatggcacggagattgtacatgttcctagcattgctgttgatgtagtggatacaactggagctggtgatacatttaatggtgcgttagcagttgcactttctgaaggagagacacttcaaaaagcaattcgtttcgcgaatattgccggtggtctttctgtaacgaaacttggggcgcaaggcggcatgccaacgagagataaagtacgtgaagtgcaggtgattgttggatgaagaaacacggcgtattaaacagtgagattgcatcaatccttgctttacttgggcatacggatacgattgtaattgctgattgcggtttaccaattcctgacggagtaaaaagaattgatttagctgttgaaattggaaaacctagctttttagatgtattgcaagtggtagctgatgatatggcaatcgaaaaagtgacgttagcagaagaagtcattataaataatgcggaagtaaataaagaaatagagcagaaattaatagagccagcatttgagtatgtatctcatgagcaatttaaagagcatacaaagaaagcgaaggcgattattcgtacaggcgaggctacgccttatgcaaatgtaattttacatgcaggcgtgattttttaataaagggaagtgatgggaatgcatattgaaatgaaaaacatttcaaaggcgttcaatggaaatcctgttttgaagaatgcacagtttatgattgaaacaggagaagtccatgcattgatgggggaaaatggagcgggtaaatcaacgctcatgaagattttaacaggtgtatacaaaaaagatggtgggacaatcacgatcgatgggcaagagcgcacctttaaaaatgcgaaagaagctgaagagtacggcatcgcatttatacatcaagaactaaacatattgccgaatttaacagtagctgaaaatatgtttctcggcaaagagttaatgtatgggaaaacaggtattttacgcactcgacaaatgaacgcgattgcgcagcagcaactagcggagttagggttgcatgtaagaggcgctatgttagcagaggaattatcggttggacaacagcaaattatcgaaattgcgaaagcattaatgacaaacgcgagcgttattattatggatgaacctactgcggcactgacggatcgtgaaatcgaaacgctctttacagtaatcaataagttacgtaaagaaggtgtttcattcgtgtacatttcgcatcgtatggaagagattttctcaatatgtgatgctattacgattttgcgtgatggagaattcgtcggaaagagattaattccagaaacatcatttgatgaagtagtgagtatgatggtggggcgcagcattggtgaacgttacccagagcgaaatagtcaaattggtgatgtcatttttgaaatgcgtaacggaacgaagaaagggaaatttgaaaatgtttcgtttcaagtgaggaaaggtgaaatccttggtgtagctggtttgatgggggctggtcgcactgatattatgaaagcgatatttggttatgaacctttagactctggacaaatttttataaatggacaagaagtaaagattgatagtccaatagatgcaattagacaaagaattgctttcattacagaagatagaaagtctgaaggattagtgttagatttttcaattcgagaaaatttagctttaccaaatttagaaagtctttcaaagggaagtgttctaagcaacgagctagaacaacagtttacggcggatatgatgaaacttcttaatgtgaaagcatctagcggagagcaggcagtgaaatctctttctggtggaaatcagcaaaaggttgtaatcgcaaaatggctaggcattcatccgcagttactcattttagatgaaccaacaaggggtgttgatgttggagcgaaaaaagaaatttactctattatgaataagcttacggagcaaggagatgccgttattatggtatcatctgagcttccagaagttttagggatgagtgatcgtgttcttgttattcatgaaggaaaagtaggcggaattttagggaaagatgaggcatcacaagagtctattatggcactagctacagggggagagtaaggatgactaagaaggggaatgtattacaacaactcggttctttaatcggtttagtattaattatcgtcgtaattacagctttaaatccagcgtttattgaaattccaaatttatttaatatactgcgtcaagtatcgattaatgcgcttattgcattcggaatgaccttcgtaattttaacagggggtattgacttatcggtaggttctattttagcattatcaagtgcacttgttgctggaatgatggcaagtggcatggatccgttccttgcaatggcagttggattattagcaggtcttgtaatgggaattgtaaacggtatcatcattgcgaaaggaaaagtagctccatttattgcaactttggcaacaatgactatttttcgtgggttgacgcttgtttatatggacggacgtccgatcactggtcttggtgatcatttaatgttccaaatgtttggccgcggttattttcttggtattccggtaccagctgttacaatgatgatcgctttcgcagtactgtacttcattttgaagaaaacgacatttggtcgccgtacatttgcaattggtggaaatgaagaagcagcagcactatcaggtattaatgttacgagaattaaagtaatgatttacggtctttccggaattttggcagcgcttgcaggtattgtcttaacatcacgattagattctgcacagccgactgcaggtacttcttatgaattagatgcaattgcagcagttgtattaggtggaacaagtctttctgggggaagaggatggattgttggtacattcatcggtgtacttattatcggtgtattaaataacggtttaaatttattaggtgtatcttctttcttccaacaagttgtaaaaggacttgtaatcttactagctgtattaattgatcgcagaaaagaagcgtaatggagggacagttcatgaagaaatggttacttatactcgttgcatgtattatggtcattactgctggttgttcaatggaaccgccagaatgggcaaaggattctagcgataaaggtcgaaataaaactattaaagttggattctctgtttcaactttaaataatcccttttttgtaactttgaaaaagggtgcagaaaagaaagcgaaagatagtggcatcgaattaattgctgttgatgcacaaaatgatgcagcaaagcaaacgaacgatgttgaagatttaattcaaaagggtgtcgatgtagttgttattaatccgaccgattcagatgctgttgcttcagcagtaagtgcggcaaatgcagcaaatgttcctgttattacagtagaccgcgttgcgaattcaggtaaggttgtttctcacattgcttctaacaatatcgaaggtggtcaaatggctagtgattacattcgtgaattagttggcgaaggagcaaacgttgctgagttagaaggaatccctggatcttccgctgctcgtgaacgtgggaaaggattccataacgtagccgataagtctttaaaagtagttgcaaaacaagcagctgattttgatagagcgaaaggattatctgttatggaaaacattttgcaagcaaatggtgatattaaagccgtgtttgcgcataacgatgagatggcattaggtgcacttgaagcattgaagtctgctggaaaaacagatgtagtcgttgttggatttgatgcaacagacgatgcagtgaaagcggttaacgatgggcgtatggctgcaacagttgctcaaaaaccggaattaatcggggagaaggcgatgcaaacagcaaaagagataacacaaggtaaaaaagtggacaaatctattccgattgaattagagcttattaagaaaaataaataaatataaaatgaaaattaggaaggaagaacaacaaatgaaattctttattgatacagcaaacgttaacgaaattaaagaggcaaatgaattaggtgtattagctggagtaacgacaaatccatcacttgtagcaaaagaaggcgtagacttccacgaacgcattcgtgaaatttgcaacgttgtagaaggacctgtaagtgcagaagtaattagcttagaagctgataagatgattgaagaaggaaaagaactagcgaagattgctccaaacgttgtagtaaaagttccaatgacaacagaaggtttaaaagcagtaaaagcgttctctgatttaggaattcgtacaaacgttacattagtgttctcagcagttcaagcattacttgcagctcgtgctggtgcaacatacgtttcaccattcttaggtcgcttagacgatatcggtcataacggtatggacttaattcgtcaaatcgcagaaatctttgcaattcatggcatcgaaacagaaatcattgcagcatctgtacgtcacagtgttcacgtaactgacgcagcattaaacggtgcacatattgcaacaatcccagcaaacgtaattgcttcattagtgaagcacccattaacagatcaaggaattgagaaattcttagctgattgggaaaaaacacaagagaaataatagaaaagcaagaatcctagtttaattgactaggattctttttttatttaaaagaattttcatgcaattttgcatattgtcttttaaatttgttatataagatatttaatatatatcacataactctttatttttcatatttcgacataaagtgaaactttaatcagtgggggctttgttcatccccccactgattattaattgaaccaagggataaaaagatagagggtctgaccagaaaactggagggcatgattctataacaaaaagcttaatgtttatagaattatgtctttttatatagggagggtagtaaacagagatttcgacaaaaacgcactaatttatctgaattttaagttttataaaaggggagaaatggaatgagaagaaaagcaccatttaaagtgttgtcatcattagcaattgcggcaattatcggatgtacatctgtaatgagtgctccgttagcatatgcagaaacggcagcaaaaaagaaagataatgtatctacaacaccaattgattacaatttaattcaagaagatcgtttagcggaagcacttaaagaaagaggaacaattaatccatcatcttctaaagaagagacgaaaaaagctgttgagcaatatattgaaaagaaacaaggagatcaggcgaataaagaaattcttccagatgctcactcacaagaaacgtctgatttcacaaaaaaagtaaaagagaaaaagatggaagaaaaggaaaatgtaaaaaaggctgaaaaaaatgttagccttgagcaaaagccagaaccaaataaaaatcaattgaatgggcaagttccaacttcaaaagcaaagcaagctccatataagggatctgttcgatcagataaagtattagtgctactcgttgaatttagtgattataaacataataatattgatcaaacaccaggttatatgtattcgaaagactttagtagagaacattatcaaaagatgttgttcggtaatgagccgtatactttatttgatggttcaaaagtaaaaacgtttaaacaatactatgaagagcagtctggtggtagttatacgacagatggatatgtaacggagtggctaactgttccaggaaaagcatctgattatggagctgatggtagcagtgggcacgataataaaggtccgaaaggtgcacgtgatttagtgaaagaagctttgcatgcagctgctgagaaaggactagatttatctcagtttgatcaatttgatagatatgatacaaacggggacgggaatcaaaatgaacctgacggtgtaattgatcatttaatggtaatccatgctggtgttggtcaagaagctggtggcggtaaattaggtgatgatgcgatctggtcacatcgttcaaaattagcagtagatccagtagcgattgaaggtacgaaatcaaaggtagattactttggtggtaaagtagcagcacatgattacacaattgaaccagaagatggagctgtaggtgtgtttgcacatgaatttggacatgatcttggattaccagatgaatatgacacgaaatatactggaaatggttcaccagtcgaagcttggtcattaatgagtggaggtagttggacagggaaaatcgcaggaacagagccgactagtttttcaccacaaaataaagacttcttacaaaagaatatgggtggcaactgggcaaaaatattagaagtagattacgataaaattaagagtggtgtgggagttcctacctatattgatcaaagtgttacgaaatcaaatcgtccaggcgttgtacgtgttaacttaccaggtaaaagtgttgaaacgattaaaccggagtttggaaagcatgcatattatagtacaagaggcgatgatatgcatacaacgttagagacaccattctttgatttaacaaagggaacaaatgcaaaattcgattataaagcaaattatgagttagaagcagagtgcgatttcgtcgaagtacatgcagtaacagaagatggaacgaagacgttaattgatagacttggagaaaaagtagtccaaggagataaagatacaacagatgggaaatggattgataaatcatatgatttaagtcaatttaaaggcaaaaaagtgaaactacaattcgactatattacagatccggctgtaacatataaaggttttgcgatggataatgtaaatgtaactgttgatggacaagttgtattttctgatgatgcagaaggacagtctaaaatgaatttaaatggttttgttgtttctgatgggacagagaagaaagctcattactactacttagaatggagaaactatgcgggatcagataatggattaaaagcaggaaaaggtccagtgtataatacaggtcttgtcgtttggtatgcagatgatagttttaaagataactgggttgggatgcatccaggtgaaggattccttggtgttgttgactctcatccagaagcgctagttggtaatttaaacgggaaaccagcatacggtaatacgggcatgcaaattgcagatgctgcattttcatttgataaaacaccagcatggagtgtaaattcattaacacgtggtcagtttaactattctggattacaaggtgttacaacttttgatgattcaaaagtatatagtaacaagcaaattgcagacgcaggaagaaaagttccaaaccttggacttaaattccaagttgttggacaggcagaagataaatcggcaggtgctgtttggattaaacgttaataacataaaagcacattcttcatatgaagagtgtgctttttaatttgtacagtaagttattattttagtttatgtaatacaagtttttattcatgtgtagtgtatcaaattatgtggggaaaggaaatatttccgaggaaattgtcgaagtatcgtcagtatttataaactttctgtttaaaagaagagatgtattattgcctttacggctcaatttatttacattgttatttggttatacacaaaagtaatatattcggcagtaaaagagcgctattggatagtgttctttttgtagatagaaaggagttgagttaaatgaaagaaataattgaatgtccacagtgtgaaggagagattactgcgcaacatattattgatctcccgcatcctttttcattcagatgtccacactgcaaggtgaggttaaaagaaatgagaatcacaccgtgcttaatattagcagcaatttgtatcattccactgtttattataattggagagagtattaaggaattactagtaaaatatttttctattatagatgatgtaccaactgtacttattttcttcttattttgttatccattgtattatttctatgaaaaatataatgctatattgtttattaaatacggcttattgaaagttaaaagttgaattgaataggagattatcataatgctttggaaaatatatttagttattgtagcaatgttagctattatttcgttagtaaggggcatgtttcaaacaccaattcaaaagtttgactttgtagtttctattattacgtggatagggctctttggttttgtatttgatatacaaatattaacctcaattgtttggaaatgtatcttcttgtttagcgtcatttggactttaactgcagtttttgtttttcgtttatatgaagagcgagatgagccgttaccttttatatttaaagtaattggaattattccaacgcttccattatattacggattatatcaatatgcatttaaaaaaagacaacgatggattatcccatcattgtcttttttactttgcttcttacataaatcatcccagcaaatgttaataaaaatgctgtcccgataatgaagctgatgctaggtgatgctccgattgcgccgactgtaaaggagccagcaacaactcctaatgagaagaaggcataaaataatccgaatgcctttccgcgattatcgtctgtagtattttcaacgagtaaagcgttaatagacgggaagaggattgcgaatccaattccataaatcatcattacgataaagagcataccttttgtagcaaataatccgagtaaagataatgcgaatgccataactgcaattccgattagcattagtttcgaacgattaaatcgatcgtaaatacgatttgttggaagcaagaagaagaggatagcagttataccaaatacacttaacatcatgcctgttgtggatgctttaagcgctaatgcctcaacttttactggtaacatataagtgacaattccttgtgaaaacattaatgtgaaagcaccaatatatgcttgtaataacggttctgattttaaaagttcaaccatatcttctttgttcatcatttgcgttcttgatgtatcttttcttgatacgttatttggtaagaagaatagagatacgatcgtaccaagagccattaaaatagaaatagtaatgaagacccattctacgccagctgttgctttcataataccgctgaaagccggtcctacgattgcggctgttccaacagcagcaccagatagagccattgcttttccttgtttttttgcagttgtttgttttgataaaaatgtaaaggcagcaggaattaaaaagccatcactaaatccatgcataaagcgaacaactaatagttgttcaccactttgaacaacggtgtataacaagactatgaaactcgtaattcccatgcttatataaaggattttttttgcaccaaatttatcgacagctgctccagcaataatattaccgatcatattagcgaatgagtacataccgacaactagcccgataataagaggggttcctccaaggctttgagcgaaagtactcataataggtaattgtgaaaatgtatctaaaaatgccacgataacgataaagtaaataaaatatttcaagcgatattcacctctcctatgctattatggcataatgctaatttcacctgcaatgaaattgaattaacagatgtggaaaaaagtacaaagtgacaaaatattgaacgttatttgtaaaaaattagtagagatgcgattgtttttttgaaatatatggatagaagtattataatagaattgtaaacttcaccaggttaagtatatacatagagagggatgtataaaatgaaagcactactttggcataatcaacgtgatgtacgagtagaagaagtaccagaaccaacagtaaaaccaggaacagtgaaaatcaaagttaaatggtgtggtatttgtgggacagacttgcatgaatatttagcagggcctatttttattccaacagaagaacatccattaacacatgtgaaagcacctgttattttaggtcatgagtttagtggtgaggtaatagagattggtgaaggagttacatctcataaagtgggagaccgcgttgttgtagaaccaatttattcttgtggtaaatgtgaagcttgtaaacatggacattacaatgtttgtgaacaacttgttttccacggtcttggcggagaaggcggcggtttctctgaatatacagtagtaccagaagatatggttcatcacattccagatgaaatgacgtatgaacaaggtgcgcttgtagaaccagcagcagtagcagttcatgcagtacgtcaaagtaaattaaaagaaggggaagctgtagcagtatttggttgcggtccaattggacttcttgttatccaagcagctaaagcagcaggagcgactcctgttattgcagttgaactttctaaagaacgtcaagagttagcgaaattagcaggtgcggattatgtattaaatccagcaactcaagatgtgttagctgaaattcgtaacttaacaaatggtttaggtgtaaatgttagctttgaagtaacaggtgttgaagttgtactacgacaagcgattgaaagtacaagcttcgaaggacaaactgtaattgttagtgtatgggaaaaagacgcaacaattactccaaataacttagtattaaaagaaaaagaagttattggtattttaggataccgtcacatcttcccagctgttattaaattaattagctctggtcaaattcaagcagagaaattaattacgaaaaaaattacagtcgatcaagttgttgaagaaggatttgaagcacttgtaaaagataaaacacaagtgaaaattcttgtttcacctaaataagatagaatcgaatagagtagcccttttctagaaatagaagagggctactttttttctatactgaaaggtgatagactttcctttgactaaatgtatttttgtttggaagggagaatctaatgctttcatttttgttaactttaaagcgaatgttaagagcctgtttacgagcgtggaaagataaagaatttcaagtattattcgtattaacaattttgactttaatatcgggtacgattttttatagtacagttgaagaattacgtcctattgacgctttatattttagtgtggtcacgttgacgactgtcggtgatgggaattttagtccgcaaactgatttcggaaagatatttacaatcttatacatatttattgggattggattagtgtttggatttattcataagttagcagttaatgtacaattgccaagtatattatcgaatagaaaaaaagagtaaagctggtcatctccctgtcaagtagacagaaataaaaagagtattatgccacggccttttcccgatattctatcggggaaaggccttagtttgtctagcatctaaaataaaaattgacgtttcacgttgtttgtttcgttcagttttcaaagaactacttggtcgctcatttgcgacttccttatgttaacattttcgtttttcgatgtcaactaagtttttcaatttctttttgtcgttttctgcgtttccgcatcagcgacggttattaatttaacatatacaaactattaacgtcaacactttttaataaaaaattctttttcttacataacgaatacattcttctgtgttagctactctccggaataaacagaaaatgattttatatctttcttccatggctttttttacaacttcatgaatacgctcatcttcaaaatcaaataaaagttcctctaattctctcttcaatatgtattccatttcttttctctcttcttttgtcaacatcagcccaagcaaacaatcacctcaataattccttacgcaacaataaacgttccgctcattttcaattatcacaatcctatcatccattatatccactacttacgatattaatcctttgttctcttttttatatttacagcatatatgtaactgaaaaggattggacaaaggggcgtaatattatgtttttcttttttattacgagtaagagaaattttaaacacattagcttaatagtgatactgtccttatttacagcatggctactctttttaaaaacatattcacatgaatctgctttttcaactgctacaggccctaaagtaatttacaaaggagacaccgctaaaaagcaagttgcatttacgtttgatattagttggggagacaaaaaagcaattccaatcctagatactcttaaagaaagagaaattaagaatgcaacattcttcctttctgctgcatgggccgaaagacaccccgatattgtagagcgaatcatgaaagacggacacgaaatcggtagtatggggtacaattacacatcctacacttctctagagacaaatgaaataagacgagaccttttacgagcacaagatgtttttacgaaacttggtgtaaaacaagtcaagctgttacgtccacctagtggcgaatttaacaaagcaacccttaaaatcgcagaatcacttggatacaccgtcgtgcattggagtaataattcaaacgattggaaaaacccaggtgtaaataacatcgtttccactgtctctaataatttgaaaggtggagatatcgtcttattacacgcatccgattctgcccttcaaacaaatagagctttaccgctgctcctgcaaaaaataaaaagtgatggatatgagcaaatatccgtatcacaacttatttccaacacaagtacgaaaagtgaagatgtgaagtagcttcttccctaccactcttcacgcataaaaagctctactacctttcaagaaggtggtagagctttttgaatcataccatttccagcattataactgctggtgtataaaatctctctattaagctgatttacttgtttttccgattaaacgatgtaatacaagtaattgatatgcgttacataacaatagcggtataaccattaaatataaccaatctgtatcattaatccgaagcgctggtacccattcaaggatcgttacaacaaccataaagaacagagctggcacaaatgcttttttatttgtttctttgctttttacataagcaacaattgctccaaacacaaataatattccagcaacaagtatgttattccctaacgagacttccccatttgcaataagtacagatcttaaatacacaaaatcaaataatacgaatgcaataaagaagagctggactgcattccataaagaagatgagcggaacatccctagtccaaaacggtggattgttaaatatgcaaagaatcccatttgacttataacactaaaaataaatcctacacccatcagccagaaagatactgctaaaatctccttaccgtcgaaattttgaaaaaattcattgtacttgtcccactccaaaacaaaaccaataataactgtgctaattccaccaagaaacaacgtcgttaaaaatagtcgtacccacttgcggctattcacaacacatcccccattatccttatatttctaattaaattgtatcaatgacaatttcaaaaagctagccatgttcatgtataaattccttaaagatatttatattaaaaagagagaactgtgctgaaaggagttccaacttatgaaacggatgctattcattttcgtttcttcttttctacttatcgcacttgcagcatgcgcacaaggaaaagaaacgaaatccgaactagattacgatcaaacaaagaaaatgattgttgatattttaaaaacagatcaaggtaagaaagctattcaagatgtattaactgatgaaaaaatgaaacaagcactcatactagatgaaacagtagtaaagaaaacgattgaagatgccatggtatccgataaagggcaacaattctgggaaaagctctttaaagatcctgagttctcatcgaagttcgctaaaagtatggggaaagaacaaacccaattaatgaaaaccttattaaaagaccctgaataccaagcaggcgttatagaaattatgaaaaatcctgaagtagaaaaaatgatgttacaaacaatgaagagtaaagaataccgtcaatatctacaacaagtactaacagaaactgctgaaagtccactcttccaagccaagatgattgatatcattagtaaaggtgtgcaaaaagctgaaaaaggcggatctggtaagaaagaagcaggcggtgacggtggttctcaaggcgggaagaaggaagaatagtaaaaaataataactataataacgagtggacaatttatacattgttcactcgttattactttatcttgctattaacagacgaaatggcaccctctagttaagcgaaaggtttactagcaacaaaagccttattgttgtcagtaacaggtgaaccccactgattaaagtttcactttatttttgtgtaacagctgttctatcaattactgtttcagctattttactataaataatgcccgttgtatgtgtatcttcatatactgaaggagcaaagtcttctttattccaatcgggttgttgtagcggaatgcgaccaagaacattcgtttgtaattcggtagctaacttatctcccccgccttttccaaatacatattctttctcaccagttaccttactttcaaaatatgccatattctcaacaacaccaagaatactatgttcagtgcgcaatgccatcgctccagcacgcgctgctacaaacgcagctgttggatgaggcgtcgttacaataatctctttgcaagatggcaacattgagtgcacatctaacgcaacatcacctgtgcctggtggcaaatctagtactaaataatctaaatcgccccattctacttctgtgaagaagtggtttaacattttcccaagcataggtcctctccaaataactggtgcattatcctctacaaagaagcccattgagattacctttacacctaaacgttccaccggaattatcttgtcacctcttacgataggacgtttttctatccccatcatgtctggcacactaaaaccgtaaatgtccgcatcaataataccaactttttttcctaaacgagctaaagcaactgcaaggttaacggaaacagttgattttcccacgccaccttttccactcgctactgctaagaatgttgtttttgaattaggtgacaataaagattcactttgctcttcttcttgttccggtgcaaactgagctaattcctcttctgtaaattctgcaaaacgaagtccaactgttgctgccccaagttcttttactaactttacaattccagactgcaactgcatttgttccgctgtaccggtttttacgattgcaattttgacactcacatgttccttctctggcttgactgttacctctttaattgcacttgtttcttttaatgttttatgtaaaaacggatctacaatcccttctaacgcttcaaccacttgctctttcgttatcataattagcccagccccctgtatgaaaaataacgtaatgttaattgaatttatctctgcttatccttgaaataaatgcgtttacatttccagtataacatattttccgaaaacttcgttaacgagagaagctcaaaaaaatcctccttattctggaggatttcctttttccgtgaaataacgtaatataccacggtatattgcagctgctaccttttgctgatatttctccgaatttaacatatacctttcgttcacattcgataaaaagccagcttcaattaaagcacctggtgttttagaatactttaataaatatacatgcgaaattgtcttagcagaacgattcgtgttttctaaacttgttctcaattcagcctgtataaattttgcagcacgttcattttcaatcgaagagcggtaatagaacgtttgtgcgcctttcgatccactactagttaaagcatttaaatgaatacttgcaaaaaagtctacatcaggtttattgatgatttctacacgtttttttaaatcctctgctttacgtctactatatgactttgtatctttgttagctaaatcataatctccctcacgcgttaaaataactagtgcaccttgttcttgtaaatagtcttgtaccttttttgtaatttcaagcgtaatatccttttctataatatcctttccaccaacagcccctccatctggtccaccatgcccagcatctaatacaattactttccctgataagggtaaattccaagctcgccacgattttgtaatttgaaattcttgtttaactaaaaaaaacaatacaaccgcagcgagtgcaaaagagataattcgaattctcttcatacctttcctcctccagctagtccctctaattacttatatgggacaagaggaaagtttatgcttgtcttaatgaagctttaatcgatatcttctttcacctttttcatacccttcttgccaccacaatcctataaactgctgacaagattcaaaaagtaattcctcatctttcaactttatttctcgcatagtcatactcgttaaaaattgaaatagcgtttcagttaattgttgttcttcttctaaagctctatatttcacatcaaaaaacgattcaccataataaccaaatttactgtatctcgctcctaataaataagattctatccctaattcaatacagtaatcttcatactgacgatgaagctcttgcatttgaaaggcatcacgaatatttgaacgcaatgtttttaatgataattcccgcaacatcttccgctcgtattttaactgcttttctttttgtttttcttgtaagctgacaatgacattcatagtacttataaacctccctaatacgtattagtctaaacttctaaagaagaagcatacgcgtggcggtagcactaaaatattccaagctataaaaattgcaaaagaggaatgaaacataaaaaaaccccaaccaaaatggttggggtttgtagttcgcaaaaattaacgttttgagaactgaggtgcacgacgtgcgcctttaagaccgtattttttacgctctttcatacgtgcgtcacgagttaatagacctgcacgttttagtgttagacggtattctggatcagcttttaataaagcgcgagaaataccgtgacgaatagcaccagcttgaccagtgtatccaccaccatttacgtttacaagtacatcgtagttacctaaagtttctgttgcaactagaggttgtttcactacttcacgtaatgcagcaaatgggatatagttttcaaaatcacgaccgttaatgataacgcgtccttcgcctggaactaggcgtacgcgcgctactgaactcttacgacgtccagtgccatagtattgaacctgtgccaaagtaagccctcctttaattaattatccgcgaagttcgtaaacttctggtttttgtgcttggtgtggatgctctgctccagcatacacgttaagtttcttagaaacttgacggcctaagcgtccttttggaagcatgcctttaattgcaagctctaacatttgtacagggtagtttgtacgcatttcaagagctgttctttgcttaagtccacctgggtggttagtgtgacggtagtaaattttatcgtttaatttattacctgttaaatgaattttctcagcgttaataataattacatgatcacccgtgtcaacgtgtggtgtaaatgtaggtttgtttttaccacgtaaaatggatgctacttcactagcaaggcgacctaaagtttgaccttcagcatcaaccacataccatttacgctcaacttcgttagcttttgccataaaagtcgtacgcatgtgtttccctcctcgttatcttttccatagaaaaaatctattgtttatcttaaacacgatttccttccggggctaatcgtggttttagaaacaataccatatgttatgatatacttttgagtttctaatgtcaagcaaatgttacaccaggattagttgttatagtttacctcccataagtaaagcccatgacctggagccatctttccagcaaactgacgattttgtttcgctaaaatctctggaatgctatcaggatcaagctttccttgccctacgctaagtaacgtaccaacaataattctgaccatattatataaaaatccattacctacaaaacgaaaaattatttcatcattttgttcaattaactcgatttcataaattgttcgcactttatcttttttgtcagtttttgccgaacaaaaagaagtgaaatcatgtgttccaataaaataaggaattgcttttcttatagagttgatttcgagcgggtatggatattgatatacgtaatttctacggaatacatccgcagtctttgataataatacacgataacgatattcttttttctcaacaccgtaacgtgcatgaaattcttctgtttttttctctacttgcctaataacaatatcatctggcaacattgtgtttaaagcattaatccattgccactcttcaagagacaaaggagtatcaaagtgtattacttgtccttttgcatgaactgtagaatctgttctaccagatgcctgaacacgaacaagttctcccttatgcaatttctgcaatgctttttctatctcctgttgaacagtacgatggttcggctgaatttgataaccacaaaaatgcatgccatcatatgcaaccgtacattttattctatccatttctctattctccattacgatcgcacccatgccaaaatacaagctaaacaaaataagctgacaatcgttactgtatcgctttttttccagcgtagttgcctaaatttagtacgtccttcaccactttgatatccacgagcttccatcgcaatggctaagtcctctgcacgcttaaaagcactgataaacagaggaacgagcagtgaaataatagctttcattctatcttttatcggtcccccggcaaaatcaataccacgtgacgcttgtgctttcattattttactcgtttcatccattaatgtcgggataaaacgaagagaaattgacatcattaatgcgatttcatgaacaggaacctttatacgcttcaacggctttaataacgtctccaaaccatctgtaatttcaataggtgtcgtcgttaacgttaataatgtcgtcattaaaataataacgaagaatcgtacagaaatgtatatcccttgctctaatcctttttcatatatcgaaaaccaaccaagctggaatagtacatccccctccttatttgtaaaaatatgcaggaaaaatgtaaaaagaaaaatccataaaattggttttaagcccgaaagtacataacgaatcggcacttttgcaaaaaataaagcaatgagtgcatataaaaataaaaatccatatgaaatcgcattatttgctaagaaaacaacaaatacatataaaaagacaatcagcagcttcgtacgtggatcaagttgatgaataagtgaattccccgggatatatctcccaataatcaactgctgcatgattcatgaccaccttttcgtaacacctgcacaacttcatgagtaagatcctctaaagataaggtagcctttggaattgaaataccaaacttctcttcaattgcacgtttatactttaatgacataggaagatccacaccaattttctctagttcatcggcatgtgaaaatacttcctctgcacttccttgcaaaaagaccgttcctttatgcataactacaatctgctccgcatactgagcagcatcctccatattatgcgttacaaggataactgtaagccccttttccttgtgcagcttataaaacatctccataagttcgttctgcccttttggatctagtcctgctgtaggttcatctaatacaagcacttcaggttccatcgccagtacacccgctatagcaacacgtctcatttgtccaccacttaattcgaacggagaacgtgttaacagttccggttctagccctacaagttcaattgcctttctagccttttgccttgcttcgtctacagatactccaaaattagtagggccgaaacaaatatctttctccacagtctcttcaaacaactgatgttctgggaattgaaagacaacccctacttttttacgtagtggctttaactttttttctttctttcctgccgaaatcaaatgttcaccaatttgaactgtaccatttgtcggctgcaataaaccatttaaatgttgaatcatcgttgacttacctgaaccagtatgaccaataatggcataatagcccccacttggaaacgacacatctacatcataaagtgcgcgtctttcaaatggagttttatattgataacgatgctctactttttggaatgtaatctccaaagttcgttcaccaagctttccattgtaagatgcgtattttgcaagagaatttcatttctttttaataattctgctattttcactgaaaacggtacatctaagccaatttcttggagcatatgagaggatttgaaaattttttctggagtcccttcctctaatatttctcccttatttaaaataatgacacgatctgactgtgccgcttcttctaaatcgtgcgtaatcgataacacggtaatacctttttgagtaacaagttgtctaaccgtttctactacttcacgtctcccttgagggtctagcattgacgttgcttcatctaatattaaaatagatggttgaagtgctaaaacgcctgctattgccactcgctgcttttgcccaccagataaggaatgaggctcatcattaagaaaatcttccatacggacaagtcgcaaggcctgttctaatctttcaatcatttgttctcttggcattccgatattctctaagccaaatacaacatcatcttgcactgttgttccaacaaattgattatctggattttgaaataccattccaatttgttttcgaacatcccataccgtttcctctgataaaaccattgtatcatttactgtaatagtccctgcttctggcaaaaacaaaccattcaataattttgcaagtgtagactttcctgaaccgttttgtccaataatagatacccattctccctcatataaggaaaatgaaacatcttttaatgcataagtggctgccccaggatattgaaatgatatattttctatccgaagtttctcttttttcaatataaggcaccctttccttcgcacagttagcctatttttatatttaaaaaaaagggccatgaccagtttcttgaaaagaactgtcctgcccttttaattatcattatactaactcgataattaccattggtgctgcgtctccgcgacgtggaccaatttttgcaatacgagtgtatccgccttggcgctcagcatagcgtggagctacatcagcgaatagtttttgaagtgcatcttgaccagtctcagcgttagctacttcattgcgaatgaaagctgctgcttgacgacgagcatgaagatctccgcgtttacctaaagtgatcattttttccactacagaacgaagttcttttgcacgagtttctgtcgtttggatgcgctcgttgataattaaatcagtagctaaatcacgtaacatagctttacgttgcgcacttgtacggcctaattttctgtatgccattcgtagttccctcctttgttgatgggtttaaatcctcagtcgtctttacgtaaacctaaacctaattcctcaagtttatgtttaacttcttctaaggatttacgtcctaagttacgaactttcatcatatcttcttctgttttgttcgcaagctcttgtacagtattaattcctgcacgttttaggcaattataagaacgaacagaaaggtctagttcttcgatagtcatctcaagaactttctctttttgatcttcttccttctcgaccataatctcagcattttgtgcttcatcagttaaaccaacaaagatatttaaatgctcagttaagattttggcacctaaagagatagcttcttttggcccgatgcttccatccgtccatacatcaagcgtaagcttatcataattagccacttgtccgacacgtgtcttttccacttggtaagtcacacgtgatactggagtataaatagaatcaataggaattactcctattggttgatcttcgcttttatttgcatcagctggcgtatacccacggccacgctttgcagttaaacgcacgcggaaatgcgcatcttttgctaacgttgcaatgtgtaaatctggatttaagatttctacatcactatcgtgagtaatatcagcagctgtgacaataccttcgccctgtacatcaatttccaacgtcttctcttcttcagagtagattttaagagctaactttttcaagtttaagatgatcgtcgtaacgtcttctactacgccctcaactgttgaaaattcatgtaatacgccatcgatttggatagcagtaacagcggcaccagggagtgaggataaaagaatacgacgtaaggagttacccaaagtagtaccatatccacgctcaagcggttcaattacgaatttaccatatttagcatcttcgttaagttcaaccgtttcgattttcggcttttcgatttcaatcattaactaaaccctccttcaaaacgtcgaaaccccggttaaacaaaggtataacccctgtctaaccgaaagtcccccttaggcagttcccgattgtgcacaacaagcgatgtttctgtacgaaatttctcgataatgcatcatatccattatagacaaaagggaaaattctatacagaaaaattacacacgacgacgttttggtggacgacatccattatgaggaactggagtaacatctctaattgctgttacttctagacctgcagcttgaagagcacgaattgcagcttcacgaccagcaccaggacctttaacagtaacctctaaagtttttaaaccgtgttccattgcagctttagcagcagtttcagcagccatttgcgcagcgaatggagtagatttacgagatccacggaaaccaagtgcaccagcactagaccaagaaagtgcgttaccgtgagtatctgtaagtgttacgattgtgttgttgaaagtagaacgaatatgagctataccagcttcaatattctttttcacacgttttttacgagtgtttgttttacgtgccattgttagttcaacctcctttacttattatttctttttatttgctactgtacgacgtggacctttacgtgtacgagcattgtttttagagttttgaccacgaactggtaaaccacgacggtgacgaagaccacggtaagaaccgatctccattagacgtttgatgttaagagatacttcacgacgaaggtctccctcaactttaatacgatcgatgatatcacggatacgtcctaattcgtcttccgttaaatcacgaactcgtgtttcttcagaaatacctgcttcagcaagaattttttcagcagttgtgcgaccaatgccgaatacgtaagttaaagaaataacaacgcgtttgtctcgaggaatatctacacctgcgatacgtgccattacgaatgcacctccttctgattaaccttgtttttgtttatgtttagggttttcacaaataaccattacttttccacgtctacgaataactttacatttttcgcagattggtttaactgacggtcttactttcatgtctcgaacctccttaaagattacggagtgctatattatttaaaacggtacgtaatacgaccacgatttaaatcgtacggagataattctaccgtaactttgtctcctggtaaaatacgaatgaagttcatacggattttaccagaaacgtgagccaatacgacatgcccattctctaattctactttgaacatagcatttggcaacgtttcaagaacggtaccttcgacttcaattacatcatctttagccattcaatagttctcccttcttcaaatcagtaacattttacactgctctgaaatcccggagagccagctacttataaagtggtaaggatttcgtatcctgcttctgtaagagcaatcgtgtgctcaaaatgggcacaccatttaccatctaccgttaccactgtccagtcatcagatagtgtttttacatatcgtcttccttgattcaccatcggctcaacacagatgaccattcccggctttaatctagggcctctatttggtggaccatagtgcgggatttgagggtcctcatgtaagtcttgcccgattccgtgaccaacatactccctaacgatcgagaatccattctcttcagcatgggtttgaaccgcatgtgagatatttgataatctctcgcctggttttacttgttctagaccaagatacaacgatttttctgtgacatcaagtagcttttgaacagattcagaaatgtttccaactggatacgtccatgcagaatctccatggtacccattgtatttcgcaccaatatcgatactgatgatatcgccctctttgagcttgcgcttccctggaattccgtgtacaagctcttcatttacagaagcacatatgctccccggaaatccgttgtatcctttaaaagatggcgtagcaccatatttttgaatcgtcttttccgctatttgatcgagctctttcgttgtaattcctggagtaatgtgctgtttcaactcttgatgagtcaaagcaacgatcctgccagcttctcgcatgatttctatctcgcgaggagttttgcagattatcattacgctaagcctccgatgagaacatcgatatcagcaaatactttattgatatcttgctcaccattaatgctttgtaagtaaccaagctcttcgtagaaatcaagcaaaggttttgtttgcttaatatttacatctaaacgatttgctacagtttcttcattgtcatcagagcgttgatataattcgccaccacatttatcgcacacatcagcttttgctggtggattgaattctaagtggtaagtcgcaccgcactctttacaaatgcgacggcctgtaaggcgttttaataacaaccctgaatccacattaatgtttaaaacatagtcgatttttttgccaagatctttcataatttcttcaagagctgatgcttgtgcaacagttcgtgggaaaccgtctagtaagaaacctcttacgcagtcgtcttgacttaaacgttcacgaacgattccgatcgtaacttcatctggaacaagtgcacctttatcaataaaagattttgcttgtagacccatttcagtttcagccttcatagctgcacggaacatgtctcctgttgaaatgtgagggatgttatacttggcaacaatctgttcggcttgtgtacctttaccagcaccaggaagccccattaaaattaagttcatccttgttccccctcagagtacatgagcatgtagggaagacaattcttcccacttactcactgcttgataaaccctttgtaatggcgttttaccagttggctttctagctgcttcattgtttctaaagcaacgccgacaacgattaacatactcgttccaccgatctgtgcagatggaggaagatttcccaatttcgtaaagataactggtaagattgcaatcgctgctaggaaaattgatcctacaaaggtcaaacgatacaagatttttgttagatattgttccgtattcttacccggacgaatacctggaacatatccaccttgcttgtttagattctctgacatttgctctggattaacctgaacaaatgcatagaaatatgtgaaggctacaatgagcgcaacatatatgatcattcccactgggtgagaatagttaaagtttgcaataatccactgcgatacatcatgtttcgggaagaactgtgcaatagtcggaggcgtaattaagaatgaaacagcaaaaattactggaataacaccagcactattcaccttaagcggtaaatgtgtgttttgtgctccagcataaccaccatttcctcctgttacacgcttcgcatattgaattgggatctttctaacagcctgttgaatgaaaataacacccacaataactgctagcacagctagtaaaatcaatgcaactttaacgatactcatgaacaattgatctccgatattttgaaactgttgctgatacacttgagatataacacttgggatcgctgcggcaataccgccaaagataaggatggaaataccattacctacacctttagctgtaatctgttcacctaaccacattaaaaatgcagtaccagcagtcagtaccgtagcaatgtataaataagtgctccaacctggattcaaaattaattgtccacctaccataccgttaaaaccgattgacataccaaacccctgaataaacgcaagaacaattgtaaagtaacgcgtgaattgcgttaatttacgacggcccatttcaccttgcttcgaccattccgaaaatttaggaacaacatccatctgcaataattgcacgatgatggatgctgtaatatacggcatgattcccatcgcaaagatggagaagtttttcaaggctccaccgccaaatgtatttagaatacctaaagcatttaattgatcttgtgccttcagtacgtctccatttgtaaatggcacggggataaacgtgccaatcctgaatacgattaacatcgctaaagtgaataatattttacgtcttatctcagcaacgcgcataaagttggagattgtacgaaacattagatcacctcaactgatccgccagctgcttcaattgcttctttagcacttgaagagaacttgtgcgctttaacagttagttttttctctactgctccgcttgcaagaactttaacaccgtcgtttaacttgctgataacgccagtttccagcaataattcaggtgttacttctgtaccatcttcaaaacgatttaacgttgataagtttacaatagcaaactctttacggttaatgtttgtgaagccgcgtttgggtaaacgacggaataatggagtttgaccaccttcgaagccaagacgaacaccgccgccagaacgtgcgttttgtcctttatgacctttaccagcagttttaccgttaccagaaccgataccacgaccgacacggttacgtactttacgagaaccttctgcaggttttaattcatgaagtttcattcccaggcacctccttatattaatgagttatccttaagcttcttttacagttacaaggtgagaaactttgttgatcataccaagaatagcaggagtttcttccttaactacagttgaattcaactttttaagacctaaagcttctaccgtcgcacgttgatcttgtggacgaccaattacactacgagtgagggtaatttctaactttttcgccatttgttttccctccttaacctagtagctcttctacagatttaccgcgtaattttgcaacatcttcagcgcgcttaagttcgcttaatccgttcacagtagcgcgaatcatgttgattggtgtgttagaaccaagagatttcgaaagaatatcttgtacaccagctaattcaaggaccgcacgaacaggtccaccagcaataacaccagtaccctcagcagcaggttttaagaatacttcaccagcgccaaaatgaccgttgattgtgtgtggaattgttgtaccaactaatggtacagcgattaagtttttcttagcgtcttcgatagctttacggattgcgtctggtacctcttgtgctttaccagtaccgaatccaacatgaccgtttttatcgccaactacaactagtgcagcaaagcggaaacgacgaccacccttaacaactttcgcgacacgatttatcgtaactacacgttcttcaagttctaatttacttgggtcaatgcgatgcatcaattttccctcctttgaccattaaaattgtaatccagcctcacgagcagcttcagctagagctttaacacggccatggtataagtaaccaccgcgatcaaatactacttctttaacgcctttctctacagcacgcttagcaactgattctccaactttcgtagcagcttcaatattgctagtaccgttaagagcaaggtctttatcaagagtagatgcacttactaacgttacaccattcacatcatcaataacttgagcgtaaatatgttggttagaacggaacacgtttaaacgtggacgctctgcagtaccagtaagtttagcacgtacacgtgcatgtcttttcttacgagtcgcatttttatcagctttagtgatcattcttgtcactcctttctctcacctaacgggtttacttagcagttttaccttctttacgacgaacaacttcgccttcgtaacgaatacctttacctttgtaaggctcaggagcacgtacagcacggatgttagcagcgaattcgccaacacgttgcttgtcgatacctttaattacgatcttagttggtgcaggtacttcaacttcaagacctgcttccggagtcatttctactggatgagaataacctacgcttaatacaagtttatcaccttgtttttgagcacggtaaccaacaccgactaattcaagtccgcgtgcgaaaccttcagttacaccttcaaccatgtttccgattaaagcacgagttgtaccgtgtaatgcacggtgttccttctgttcagatggacgctcaactgttaatgtattctcttcaattttgataagcatatcagcattgaaagtacgagttaattcacctttagggccttttactgttacagtattgtcttctgcaactgtaatagtaacacctgcagggatttcaagaatctttttaccaatacgagacatgtggtcacacctccgttcgttttaaatatatattaccaaacgtatgctactacttctccaccagtttgtaattgacgagcgtctttgtctgtcattactcccttagatgtagaaacaagagcgatacctaatccgttaagtacacgtggtacttcgtcagctttagcgtaaacgcgtaagccaggtttactgatacgttttaatccagtgattacacgttcattgtttgcaccatatttcaggaaaatacgaaggataccttgtttgttatcctcgatgtattctacatcacgaatgaaaccttcacgttttaaaagttcagcgatctcttttttgattttagaagcaggaacctctaatttctcatgacgtaccatgttcgcattacggatgcgagtaagcatgtctgcaattggatctgtcatcaccatgtgttttacctccttcccatttgtgggttttaccaactagcttttttaacaccaggaatttgacctttatatgcaagttcacggaaacaaatacggcaaagtttaaatttgcggtatacagaatgcggacgaccgcagcgttcgcaacgtgtatactcttgtactttaaacttaggagtacgcttttgtttcgctatcatagattttttagccacgttttcgcctcctctacttagcgttggcttccattatttttggaatggcataccgaattgtgttaaaagttcacgagcttcttcatcagttttcgctgtagtaacgattacgatgtccataccgcggactttgcttactttatcataatcaatctcagggaaaataagttgctctttaacacctaatgtatagtttccacgaccatcgaatgatttcttagaaacaccacggaaatcacgtacacgtggtaaagaaactgatactaatttgtcgaagaactcatacatttgctcgccgcgtaaagttactttcgcaccgattggcataccttcacgaagacggaaaccagcgattgattttttagcacgagttacaacaggtttttgacctgtgatttgtgttaattcttctactgcgttgtctaacgcttttgagttagataccgcgtcaccaacaccagtgttgattacgatcttttcgatttttggtacctgcattacagatttatagttaaacttgctcactagagcaggagtaatttccttttggaacttctctttaaggcgattcaatgaagtgacctcctttcttaagaaaattatttatctaataattcaccagatttttttgcaatacgaacttttttaccatcttctactttgaagcctacacgagtaggttcacctgttttcggatctaaaatcataacgttagaaacgtgaataggtgcttctttagtaataattccaccttgtggatttaattgagatggcttagagtgcttcttaacgatattgacaccctcaacgataacacggttttgctttgggaaagccacaaggataacgccttgttttcctttgtctttaccagtgattacctgtactttatcacctttttttacatgcatcttaattctgcacctccttagcaaggcaataccttaaattatagaacttctggagctaaagaaacgatcttcatgaagttgctatcacgtaattcacgagctactggtccgaagatacgagtaccacgtgggctcttatcgtctttaatgataaccgctgcgttttcatcaaatttgatgtaagaaccgtccggacgacgagctccgctcttcgtacgtaccactactgctttaacaacgtcaccttttttaacaacgccacctggtgttgcttgttttaccgtagcaacgataatgtcaccaatgttagcatatttacgaccagagccgcctaatactttaattgttaaaagttcacgtgcaccagagttgtcagcaactttcaaacgagattcttgttggatcatgttatgaaacctcccttcggactaaaaattccgattcgtctatttagataataaccgcttcttcaacgatttcaactaaacggaaacgcttagtagcagaaagcgggcgagtttccatgattttaacgatatcgccaagtttcgcttggttttgctcatcatgggctttgtacttcttagaatacttaacacgttttccgtacaaggaatgagttttgtaagtttcaactaaaactgtaatcgttttgtccattttgtcagacactacacgaccagtataaactttgcgttggttacgttcgctcactatgcaaacctcccctcaatttatcgattaattccgatctctctttcacgaactacagttttcatacgagcaattgctttacgcacttcacgaatgcgagttggattctctaattgtcctgtagcaagttggaagcgaagattaaacaactcttcctttaaagctttaacttttgtttcgatttcggcagtggttaattcacgaatatcattagttttcattagattcaccaccattttcttcacgttttacgaatttacatttcacaggtaacttgtgagctgcaagacgtaatgcttcgcgtgctacctcttcagatacacccgcgatttcaaacataattttcccaggttttactactgctacccagccttctggtgcccctttaccggaacccatacgtacttctagaggttttgcagtgtaaggtttagaagggaaaattttaatccatactttaccgccacgtttcatgtaacgagtcattgcacgacgagcagcttcgatttgacggtttgtaatccatgaagcagcttgtgcttgtaaaccgaattcaccgaaagcaatttcagttccacctttagcacgaccacgcattttaccacgatgctctctacgatattttacgcgttttggcattaacatattattttcctccttcctcagaagctttcttttttgtaggaaggacttctccacggtagatccatacttttacgcctaatttaccgtatgttgtatcagcttcaactgctgcatagtcaatatcagcgcgaagtgtatgaagtggaacagttccttcactgtaagattctgcacgagcgatatcagctccgccaagacgaccagaaacctgtgttttaatacctttagcacctgcacgcatagcacgttgaataacttgcttttgtgcacgacggaatgatacacggttttctaattgacgagcgatgttttcgcctactaatttagcgttaagatcagctctcttaacttctaaaatgttgatgtgtacacgcttgcctgttaattggttaagagctttacgaagtgcttcaacttcagtaccacctttaccaattaccataccaggttttgcagtgtgaattgtaacatttacacgatttgctgcacgttcgatttctactttagcaacagcagaatcttttaagcgtacattaatgtactcacggattttgatgtcttcatgtaataatgtagcgtaatctttctcagcgaaccaacgagattcccagtcacggataacgccgacacgaagaccaattggattaaccttttgacccatcgattatccctccttcttttctgataccacaactgtgatgtggcttgtgcgtttgttaatttggcttgcacgacccattgcacgtggacggaaacgttttaacgttggaccttcgtcaacgaaaactttttcaacaactaggttgttaatgtccatctcataattgtgctctgcatttgcgattgcagattttaaaactttttctacaactggagaagcagtttttggtgtgtggttaaggatagcaatcgcttcacccacttgcttacctcggattaagtctactactaaacgaactttacgaggagcaatacgaactgttctcgctactgctttagcttgcattgaagtgcctcctctcattatcttctagttttcttatcgtcagcaaggtgacctttgtacgtacgagttggtgcgaattcacctaacttatggccaaccatatcctcagtgatgtacacaggtacgtgtttacgaccatcatatacagcgattgtgtgtccgatgaactgagggaagattgttgaacggcgagaccaagttttaacaacttgtttttgctcagatgcaactaatttttccattttgctcattaagtgatcatcgacaaatggtcctttttttaagctacgagccattttggtgcctcccttcgtgattggcgtacggttctagaaatgaaccgtactacaatcccattattttttacgacgacgaacgatgaatttgtcagacgctttgtttttcttacgagtcttgaatccaagagttggtttaccccatggagacattggagacttacgtccgattggagaacgtccttcaccaccaccgtgtgggtgatcaaccgggttcattacagaaccacgaactgttgggcgtttacctaaccagcgagagcgacctgctttaccgattttgataagttcgtgttgttcgttacctacttgaccgattgaagcgcgacaagcagataatacaagacgtacttcaccagaagttaaacgtacaagtacgtatttaccttctttaccaagtacttgagcagatgtaccagcagaacgaactaattgtccgccacgaccaggcttaagctcgatgttatgaacaacagtacctactggaatgttgattaatggtaatgcgttaccgattttaatgtcagcttctgggccagacataacttccatacctacttctaaagatttaggagcaagaatgtaacgtttttcaccgtcaacgtagttaattaatgcgatattcgcagagcggtttggatcgtattcgatcgtagcaacgcgtcctggaattccatctttgttacgcttaaagtcgatgatacggtattgacgcttatgtccgccaccttgatgacgtacagtgattttaccttggttattacgaccagccttcttgcttaaaggagcaagtaatgacttttcgggtctatcagtcgtgatttcagcgaaatcattcgtagtcatattacgacgaccgttagtagttggattatactttttgattcccatctcaatttccctccttctttagtaagaattaaacgccttggaagatttcgatttctttgctgtcagcagttagcttaacgattgctttacgacgacggctagtaaaaccagcgtgacgaccaacgcgttttgctttcggcttgtagttcatgatgttcactttttctactttaacaccaaagatcgcttcaagagcatctttaacttctgttttattagatttaacgtccacatcgaacgtgtattttttttcagccatcatttccatagaacgttcagtgataactgggcgcttaatgatatcacgaggatctctcattatgcaagcacctcctctactttttccactgccgcttttgtcatgattagcttatcatgatgaagcacgtctaaaacgtttacgccatcagcagtgattactgttactccagggatattgcgagcagataactctacagattcgtttgcatcagcagttacgataagagctttcttctcaacagttaatcctttaagtactgctagcatatcttttgtttttggtgcatttaacactaggtcttcaagaactacaatgttgttctcaactactttagtagctaatgcagatttgattgctaaacgacgaactttcttaggaagtttgtacgcatagcttcttggtgtaggtccgaataccgtaccaccaccacgccattgaggagagcggatagacccttgacgagcacgtccagttcctttttgacgccatggtttacgaccaccaccgcgaacttcagagcgagtttttactttgtgtgtaccttgacgtaaagatgcacgttgcatcattacagcttcgaaaagtacagcttcatttggttcgataccgaaaatagcttcagctaattcgatttcaccaacctgtgaaccagtttggttatatacagtaacttttggcattggaattcctccttcctattgtgaattatttgctaaccttcacagcgccttgaacaactacaagagatttcttagcacctggaacgttaccttttactagtaataagttgcgctcagtgtcaacttgaacgatttctaagttttggatagtaacttggtctccacccatacgtccagcaagttttttgcctttgaatacacggttcggagcaactgggcccattgaacctggacgacggtgatagcgagaaccatgagacataggtccgcgagattgtccgtggcgtttgataacaccttggaaacctttacctttagaaattcctgttacatcaacgatttcacctgtagcgaatacgtcaacttttacctcttgaccaacctctaatccgtccacgtctgcatcgcggatttcgcgaatgaagcgcttaggagttgtagatgctttagcagtgtggccttgttcaggtttgttagttaacttttcacgtttatcttcaaatcctaactgaattgcattgtagccatcagtttcagttgttttcttttgaagaacaacgtttggattagcagcgataactgttactgggattaactcaccgttctcagcaaatacttgagtcataccgatctttcttcctaagattcctttggtcatgagttacacctcctacatttttaagttatataaattatagtttgatttcgatatctacaccagatggtaagtctaaacgcattaatgaatctactgtttgtggagtaggactcacgatgtcgattagacgtttgtgcgtgcgcatttcgaattgctcacgagaatctttgtacttatgaacagcacgaagaattgtgtaaacagttttttcagttggtaatgggatcggaccagaaactgttgccccagaacgcttagctgtttctacaattttctcagctgactgatcaagaatacggtgatcgtaagcttttaaacggatacgaattttttcttttgccattattttccctccttcgttcgcctatttctaaaatagaccttctccatggaaatttccccacaccatgccatggcaaagcggccgggtgtgtcagcaaccttccacttcatcgcagtcaaagaccaacattgtctattatacaatgttattcgtctagatgcaagcatctttttgtttgcatctgcttttctctacttttgctattatacatggcactttaaagaatttcaagttttcatctaacagaattcattttacagtttctggattatcttttattgtttttatattactatagaagaaactcgtcaaaacaaaaaaacactctcttatcccttatataaacgcaaacaaaaaacctaagggaaaatcccttaggtttttttatatcagttaagattactcaacgatagtagcaactacaccgtaacctactgtacgtccaccttcacgaatagagaatttagttccctcttcgatagcgattggagcgataagttcgatagtcatttcgatgttgtcaccaggcattaccatttcagtaccttctggtaattggatgataccagttacgtcagttgtacggaagtagaactgaggacggtagttagcgaagaatggagtgtgacgtccaccttcttctttagataatacgaaaacttcagctttgaatttagcgtgagcttttacagaaccgctttttgcaagtacttgtccacgttggatgtcttcacgagcaaccccacgaagtaaagcaccgatgttgtctccagcttgagcttggtcaagaagtttacggaacatctctacaccagttacagttgtagaagcattttcttcagcaagaccgatgatttctactacgtcaccaactttaacgataccgcgctcaacacgaccagtagcaactgtaccacgacctgtgatagagaatacgtcctctacaggcattaagaatggtttgtcagtttcacgttctggagttgggatgtaagcatcaacttcagccattaattcaatgatttttgcttcccaatcagcttctccttgaagagctttaagagcagaacctttgattacaggaatgtcgtcgcctgggaatccgtattcagataataggtcgcgaacttccatttctactaattctaataattcttcgtcatctaccatgtcgcatttgtttaagaatacaacgatgtaaggaacacctacttgacgagaaagaaggatgtgctcacgtgtttgaggcattgggccatcagcagcagatactactaagataccgccgtccatttgagcagcaccagtgatcatgtttttaacatagtcagcgtgacctgggcagtcaacgtgtgcatagtgacgagtttcagtttcgtactcaacgtgtgcagttgagattgtgataccgcgctctctttcttctggagcagcatcgatttgatcgtatccgcgtgcttcagcaccaccagcttttgcaagaactgtagtgatcgcagcagttaatgtagttttaccatggtcaacgtggccgattgtaccgatgttaacatggggtttagaacgttcgaatttagctttagccattctaaattcctccttagtttatataggttattttatatttagactagaaagtgaaacttacgtcccactttctaagcttacataagtagttatacttgaacaatcgataaaaatcaattattcacctttattttttttgataatttcttcagaaacagactttggtacttcttcatagtggtcaaacaccatagagaatgttccgcgtccttgagtgttagaacgtaatgacgttgcataaccgaacatttcagaaagtggaaccatagcgcgaacaacttgtgcgttaccgcgagcttccataccttctacacgtccacgacgagatgttacgtcacccataatgtcacccatgtactcttcaggaattacaacttcaactttcatcattggctcaagaattactgggctacatttagaaaccgcagctttaagtgccatagatgcagcgattttgaacgccatctcagatgaatcgacatcatggtaagatccgtcaactaatgcagctttaatgtcaactagtggataaccagctagtacaccatttttaagtgcatcttcaagacctgctccaacagctgggatgtattcacgaggaactacaccaccgacgatcttgttttcgaattcgaatcctttaccttcttcgttaggttcaaactcaatccaaacgtgaccgaattgtccacgaccaccagattgacgagcgaacttaccttcaactttcgcagcagcgcggaaagtctcacggtatgctacctgaggagcaccaacgtttgcttccactttgaattcacgacgcatacggtcaacgatgatatcaaggtgaagttcacccataccagcgatgatagtttggccagtttcttggtcagtgtgagcacggaatgttggatcttcttcagaaagcttagataatgctgtacccattttatcttggtcagctttagattttggttcgatagctacagagataactggctctgggaattccatagactcaaggataacaaggctcttctcgtcacaaagagtatcaccagtagtagtatcttttaaacctacagcagcagcgatatcaccagcgtaaactgttgaaatctcttcacggctgttagcgtgcatttgtaggatacgacctacacgctcacgcttacctttagttgagtttttcacgtatgatccagagtttaacacaccagagtacacacggaagaacgttaacttaccaacataagggtcagtcatgattttgaatgctaaagctgcgaatggttcttcatcgctagacttacgttctacttcttcatctgtatccggtagagtacctttaatagcaggtacatctagtggagatggaaggtagtcgataactgcgtctaacagaatttgaacacctttgtttttgaatgcagaaccacagattactgggaagaattctacagaagttgtagccttacggataccagctttaagctcttctacagtgatttcttcaccttctaggtacttcatcatcatttcttcatcaagctcagctaccgcttcaataagttttccacggtattcttcagctaattctttgtgctcttcaggaatttcaacacgttgaatgtctgttcctaaatcgttaccgtacatgtaagcacactcttcaacaaggtcaatgataccattgaactcatcttcagcaccgattggtaactgaattggatgtgcgtttgcttgtaaacgatcgtggattgttcctacagagtataagaaatctgcaccgatcttatccattttgttaacgaatacgatacgaggtacgccgtaagtagtagcctgacgccaaacagtttctgtttgtggttctacaccagattgcgcatcaagtactgctacagcgccatcaagtacgcgtaaagaacgttctacttctactgtgaaatctacgtgtcctggagtatcaatgatgtttacacgatgacctttccattgtgctgtagttgcagcagaagtaattgtgataccacgctcttgctcttgctccatccagtccatctgagatgcaccttcgtgagtttcaccgattttatgaatacgtcctgtgtagtacagaatacgctcagttgctgttgttttaccagcatcgatgtgagccatgataccaatattacgagtgttttctaaagagaactctcttgccatttggtgtcttgctccttccatatatggattggatttttttattttaagtagcaaaaaagccactttatattgttacacatgtcagtatgtccagtactctcattatgtaaaacgagcgcccgatgaaagggagaggcattctccctctccacacttccataagcgacaaataaagcggtttatgcttacatttattttacgttgaatcctaccaacggtaatgagcaaatgctttgttagcttctgccattttatgagtgtcttcacgtttcttaacagatgcaccagcgttgttagctgcatctaagatttcgttagcaagacgctcttccatagttttttcaccacgaagacgagcgtagtttactaaccaacgaagacctaaagttgtacggcgttctggacgaacctcaactggaacttggtagttagcaccaccaacacgacgagcgcgtacttcaagaacaggcatgatgttcttaagagcttgctcgaatacttccattggctctttaccagtacgttcgtttacgatatcgaacgcattataaagaattgtttgagatttaccttttttaccgtcaaccatcattttgttgataaggcgtgttactagcttcgaattgtacattggatctggtaacacgtcacgtttcgcaacaggtcctttacgaggcatattgagttcctcctttcattttaaagttattattttttagcaggttttggtctcttagtaccatatttagaacgtccttgcatacgtttgtcaacaccagctgtgtcaagcgcaccacgaacgatgtggtaacgtacccccggtaaatcctttacacgaccaccgcgaattaatactacgctatgctcttgtaggttatgaccgatacctgggatgtaagctgtaacctcgataccgtttgttaaacgtacacgagcgtatttacgtaacgctgagttaggtttctttggagtcattgtaccaacacgagtacatacaccacgtttttgaggtgcagagatatcagttgattttttctttaaagagttaaaacctttgtttaacgcaggtgatttagatttccatactttatcagtacgaccatttctcactaattggttaatagtaggcatttgattatcctcccttcgcatgtttgtatgaccacatatccaggtggttcattattagttgaaaacaaagtttttgcaaggaagagcaaatgctctctcctcacaaaaacagttttaacttattattcctattgctgaagctcccacttgaatccccgaagctttaccaagcttacgaactgattcaacttttgttatgggcacgttatattgcattgcaacacgaatgatagcatgggttaaccgcatgtcagcatcctctgcgatgacaacttctttaactgtaccatttttgattgcctccaatgtgcgtttatgaccaacgactacattttcagcagttgatactttttgataagacatataaatatcctccaaagcatcgttcaggagcaaccttgattatagtaacattttgactcatacaatgtcaactaagattaattgtttttatacaaaatttatgccggaaaattttactgttccacataaacctcatcgttttctacattcatgtcatcttgtgttgtttttacaagatccactttgcgataacgattcatacctgttccagcaggaacaagtttaccgataataacattttcttttaatcctagaagttcatcgcgtttacccttaattgctgcatcagttaagacacgagttgtttcttggaacgatgctgcagataagaatgaatctgtttcaagtgaagcttttgtaataccaagtagaacaggtctagctgttgctggttgcttaccttgcagtaagaccttagcattcgcatcagtgaactgatggatatctagtaatgttcctggtaatacatctgtttcacctgcatcacttacacgaactttacgtaacatttgacgtaccattacttctacgtgtttgtcaccaatttctaccccttgcatacggtatactttttgaacttcacgtaataagtattcttgaaccgccgtaatgtccgttacttttagtaattctttcggatcaatagaaccttctgttaactctttaccgtggctaattggctgtcctggagttactttcagacgagcaccgtaaggaatagcatacgtacgagcttcaacttcaccctgtacaactacttcttggcgatctttaacgtcgttgatcgctgcgataacaccgtcgatttcactgataactgcctgacctttcggattacgagcttcgaagatctcttggatacgaggtaaaccttgagtgatatcatctccggcaaccccacctgtatggaatgtacgcatcgttaactgtgtacctggctcaccgatagattgagctgcgataatacctaccgcttctcctacttctacgtctgttccagttgctaagttacgaccgtaacacttcttacatacaccgtggcgagtgttacacgtaaacgctgaacgaatgtttacagtttcaacacccgaattttcaacgatatgagcgatatcttcagtaattaattgattttcagcaactaatacttcacctgtttcaggatgttttacagtttttcttgcaaaacgtccaacaagacgatcatataatgactcgataacttcattaccctctttaatcgcaccgattaataaaccgcgatctgttccacaatcatcttcacgaacgattacatcttgtgcaacgtcaacaagacgacgtgttaagtaaccagaatcggcagttttaagtgctgtatcagcaagacctttacgcgcaccgtgcgtagagatgaagtactcaagtactgttaaaccttcacggaaactcgatttgattggaagttcgatgatacgaccagatggattggccataagaccacgcataccagcaagctgagtaaagttagatgcgttaccacgggcacctgagtcactcatcatgaagattgggttgcgtttattcaaggatttcatcagttttccttggataacatcttttgcattactccaaatagagataacgcgatcgtaacgttcttcttccgtgattaaaccgcgacggaattgtttaattacattatctacttttgcttgtgcttcgtggagaatttcatctttttcgcctaatacaagaatgtcagataccccaactgtaataccagcttttgtagagtacttgaatcctaagtttttcatacggtcaagcatgcgagacgtttctgtaatttggaaacgtttgaatacttccgcaatgatgttaccaaggattttcttgctaaatggcgccacttcttcgcgactagcaataatttctttaatgttcgcacctttttcaacaaaatatttcgctggtgtttctttttcaaggtttgaatttgttggttcattaatataagggaacgactctggtaagatttcgttaaatattaatttaccaactgttgttaatagaagcatactcttttgctcttcagtaaatgttgcgttgtttactgcacttgcagctactgcaacacgtgtatgaagatgaacatatccattttgatatgcaagcaatgcttcgtttgcatctttgaagaccataccttcaccgattgcaccttcacgctcaagtgttaagtaatagttacctaataccatatcctgagatggagtaacaactggtttaccgtctttcgggttcaagatgttttgtgccgctaacataagaagacgagcttcagcttgagcttctgatgataaaggtacgtgaacggccatttggtcaccgtcaaagtccgcgttgtatgcagtacatacaagtgggtgaagacggattgcgcgaccttctactaatgtaggttcaaacgcctggataccaagacggtgaagtgttggtgcgcggtttagaagtactggatgttctttaatcacagactctaaaacgtcccaaacttcaggttgtacacgctcgattttacgtttcgcactcttaatgttatgtgctaatcctttttcaactaactctttcattacgaaaggtttgaacagttcaagcgccatttcttttggtaatccacattgatacatctttaagttcggtcctacaacgattacagaacgaccagagtagtcaacacgtttacctaataagttttgacggaaacgtccttgtttacctttaagcatgtgagatagtgattttaatggacggttacctggtccagtaactggacggccacgacgaccattatcgattaatgcgtctacagcttcttgtaacatacgtttttcgttttgaacgatgatgcttggtgcacctaagtccaatagacgttttaaacgattgttacggttaattacacgacggtataagtcgtttaagtcagaagtagcaaaacgtccaccgtctaactgtaccattgggcgtagttctggcggaattactggtagaacatctaagatcatccaagacggttcatttccagagttacggaatgcttctaatacttctagacgtttaatagcacgagtacggcgttgtccttgtgctgtttttaattcttcttttaagaagtctacttctttatctaaatcgatgtcttgtagtagctttttaattgcttctgcacccatagcagcttggaatgtgctaccatatcgatcacgatatgcacggtattctttttcagaaagtaattgcttcttatcaagtggtgtatctccactttctgttacaacataagaagcgaaataaattacttcttcaagcgcgcgaggggacatgtctaagacaagtcccatgcggctcgggatacctttgaaataccaaatatgagatacaggagcagctaattcgatatgacccatacgttcacgacgtacttttgcacgcgttacttcaacgccacatcgatcacaaactacacctttataacgtacacgtttgtattttccgcaatgacattcccagtccttttgtggtccgaaaatacgctcacagaacaagccatctttttcaggctttaacgtacgatagttaatagtttctggtttcttaacttcaccgtatgaccaagaacgaatcttgtcaggtgaagcaagtccaatcttcatatattcaaagttatttacatctatcaaggggcctacctcccttttagtctacaggttatcccaattattccttagttgtctcaacttcgacattcaatttatctgctgattgatgatcatcgtcatcttctgtatcacgcatttcaatttctgtatcgtcgctagacatcattttaacgtccatacctaaactttgcagctctttaatcaatactttgaatgattcaggaacgcctggttctggaacattttcgcctttaacaattgcttcataagtcttaacacgtccaacaacatcatcagacttcactgttaagatttcttgaagagtataagcagcaccgtaagcttcaagtgcccaaacctccatctcaccgaaacgctgtccaccgaactgagctttacctccaagaggttgctgcgttacaagtgagtatggtccagtagaacgagcatgaagtttatcgtcaaccatgtgcgcaagtttaatcatatacatgacaccaacagatacgcggttatcgaatggttcaccagtacgtccgtcatacaggattgttttcgcgtcatttgccataccagcttcttcaattgtgccccaaacatcttcctcacgagcaccatcgaatactggtgttgcaatgtgaatgccaaggtatcttgctgccataccaagatgaagctctaatacctgaccgatattcatacgagatggtacccctaatgggtttaacatgatatcgattggcgtaccgtctggtaagtaaggcatatcttcttctggtaaaatacgagaaataacacctttgttaccgtgacgtccggccatcttgtcaccttcagaaattttacgtttttgaacgatatatgcacgtacaagttgattcacgcctggtggcaattcatcgccatcttcacggttgaatacttttacgtctaagataataccgccaccaccgtgtggtacacgtagtgatgtatcacgtacttcacgcgctttttctccaaagatagcatgtaatagacgttcttcagctgttaattctgttacacctttaggtgttactttaccaacaagtaaatctccatcttttacttcagcaccaacgcgaatgataccgcgctcgtcaaggttacgtaatgcgtcttccccaacgtttggaatgtcacgtgtaatttcttctggtccaagtttcgtatcacgagcttctgattcatattcttcaatatgaatagaagtgtacacatcatcttttacaaggcgctcactcatgatgatcgcatcctcgtagttataaccgtcccaagtcatgaagccaacaagcacgttacgtccaagtgctagttcacctaattccatagaaggaccatccgcaaggatttcaccttttacaacttcatttccaacacttacgattggacgttggttgtaacaagttccttggttagaacgaatgaatttttgcattttgtagcgatctaagtcgccttttactgtttgaccgtcaacttctacatagcgacgtacccaaacttcacgtgcttctacgcgctcaacaacaccaggatgtttacagattactgcagcacctgagtcttttgctgatacgtactccatacctgtacctacaatcggagattccggattcattaacggaaccgcctgacgttgcatgttcgctcccataagtgcgcggttagagtcatcgttttctaagaacggaatacaagctgtcgctgccgacactacttgttttggagatacatccatgtagtcgatgcgttctctatttgtgacaatgttttcaccacggaaacgagctacgatatcttcacttaggaattcaccttcgtcagataatttcatattcgcttgggctacaacataattatcttcttcatctgctgttaagtaatcaacatgccctgttacaagaccagtttctgggtcaacacgacggtatggtgtttcaatgaaaccaaactcatttactttcgcgaacgaagataatgagttaatcaaaccgatgtttggtccctctggtgtttcaatcggacacatacgaccgtagtgagagtaatgaacgtcacgcacttcaaagcctgcgcgctcacgcgttaaaccaccaggtcctaatgcagatagtcttcgtttgtgagttaactctgctaatggatttgtttggtccataaactgagataactgagaacttccgaagaactctttaatagatgcaataacaggacgaatattaattagtgcctgtggtgtaatcgcatttgtatcttggatcgacattctctcacgaacaacacgttccatacgagaaagaccgatacggaattgattttgtaatagttctccaacagaacgcagacgacggtttcctaaatggtcaatatcatctgtatcccctactttgtatagtaggttgaagaagtaactgatagaagcaaggatatcacctggtgtgatgtgtttcacatcacgagtaatgtttgcattaccaattacattaattacgcgttcgccttccgactcaggagcataaatcttaatagattgcagctcaacatcgccttctaccactccacccattggtttcgctgttttgaatccaatgtttttctctaagtaaggtaaaatgcgatcaagtgtacgacgatctaagattgttccttctgccgctaaaatttcaccagtttctggatccactaatgtttcagctaaacgttgattaaacaatctgtttttaatgtgtaacttcttgttgatcttatagcgacctacatttgctaaatcgtagcgctttggatcgaagaaacgagacacaagtaagctcttagcattttctactgttggtggttcaccaggacgtagacgctcataaatttcaagcaatgctttttctgtgctatctgtgttgtctttttctaatgtgttgcttaagtattcgttatcacctaaaagctcggtgatttcttgatcagagccaaaccctaatgcgcgtaacaaaacagttacaggaagtttacgcgtacggtcaatacgcacatatacaacatccttagcatctgtctcatactctaaccaagctccgcggtttggaattacagtagcagtaaaaccacgttttccgtttttatccactttgccactatagtatacgcttggagagcgaactaactgggaaacgataacacgttctgcaccgttaattacgaatgttccagtctctgtcatgagtgggaaatctcccatgaacacatcttgttcttttacttcaccagtttccttgttgattagacgcacttttacacgaagtggtgctgcatacgtcacatcacgctctttgcattcgtctacagagtatttaggttcacctaagctgtagtcgataaattcaagcgatagatttcccgtaaagtcttcaatcggagaaatgtcttggaacatttctcgcaaaccctcatcaagaaaccactgataagaagaggtttgaatttcgataagatttggtaactctaatacttcactaatacgggcataacttcttcgttggcggtggcgtccgtattgaactagttgacctgtcaactgcttcacccctcaaatcatgagtattataaatgcacaaaaaaatttgtgcaaaatcacaaataaatacaactactgctattagcgtagtctctttctcttaaagataaatacgttgagtctttctacctgctcaaaaaagaaaaatggcttctataagaaaaccatcattctgtttcataatctgctgattttactatcttttccaagagaaacaaaaatatacatctttctcaacgcagaaaatcatatattggcattgtataatgttaacatagccaaaaataaccgtcaacgtttttttgattttatgatataatatccttttttcttttctacaacctcaacttcagaaaatacttcttctagtttttttagcgcagacggtgcaccttgtttcttttgaataacaatccaaagctctccatctggaactaaatactccacagctttttctaaaatctcatgtacgatatctttacccgcacgaattggagggttagatagaatagcagcatacttaccatctacattttcatagacgctactttgaaaaatacgtatattctcgattttgttattagcggcgttttctttcgcaagcccaagtgccctctcgttcacatccaccatgtgaacttcacgaccttgaaactctttcgctaacgacaaaccaataggaccgtatccgcaacctacgtctaatatatcacctttaatatctggcatttgaaacgcttcaattaaaagacgggaaccaaagtccacttcgtttttcgagaacaccccatggtcagataagaaagtgaatcgagatccacgaagggcaaactcccatcgcttacgatcacttttactagaagggtcgttagaaaaataatggtctgccatatggccacctcttttctttacagttaaaaaaaagctcgcatgagagcgagctttttttaaagcatcaaaagttaattacttaacttctacagcagcgccaacttcttcaagtttagctttgatttcttcagcttcttctttagcagcagcttctttgattacttttggagtgttgtcaactaattctttagcttcttttaagccaagaccagtgatttcacgaacaactttgataactttgattttttgtgcaccagcgctagttagttccacatcaaattcagttttctcagcagcagcttctccagcgccaccagcaacagctacaggagcagcagcagttacgccgaattcttcctcgatagcttttactaagtcgttaagttctaatacagtcatagatttaactgcttcaatgatttgttctttagtcattgtaaatatcctcccttaaataggtttgtattgttttatcgataatacgtaattatcttttaaaaaattaagcgccttgctcttccttttggtctgcaactgctttagtagcaagtgcaaggttacggattggagcttgaagaacgctaagaagcatagaaagtaagccttcacgtgatggaagagtagcgattgctttaacctcatcaagtgttacaagtttaccttcgattacgcccgctttaatttctaaagcttcatgatctttagcgaagtcgtttaatactttcgcaggagcaactacatcctcgttactgaacgcgattgcgtttggtcctgttaagaattcatttaactcagccatttcagcagattctgcagcacgacgagttagagagtttttgtaaactttgaactcaacgccagcttcacgtaattgcttacgtaattctgttgcttcagaaactgttaaaccacggtagtcaacaacgattgtagatttactagcgcgaagtttgtccgcgatttcagttacaacttgttgtttagtttcgattactttgctcatgttattacacctcctgtagattatatagaagatgtaccgaaagtgcactaaaaacctccatgcccaacttgtagacatggaggcatatagtcacagaaaaaagattccgcttcgtatattaacacctaggtaggaaattaagtctattgacacctactgtctacggtacactaattaaattcacaacataaatgattatattaaaacttctttatgaagtcaacttccaaaatttacgctaatgtagaaacgtctacacgtacgccaggtcccattgtagaagcaactgttacgttcttcatgtaagtaccttttgcagcagctggcttaactttttgtaaagtgtcagcaattgttttgaagttttctactaatttagcatcttcgaaagatactttaccgattggaacgtggatgttaccagctttatcaacgcggtattcaactttaccagctttgatttcgttaacagctttagttacatcgaaagtaactgttccagttttagggtttggcattaaacctttaggtcctaatacgcgaccaagtttaccaacttcacccatcatgtcaggagttgctactactacatcgaaatcgaaccaaccttgttggattttaccgatgtaatcagtatcgcctacgaagtcagctccagcagcttcagcttctttagctttttcacctttagcaaatactaatacacgttgtactttaccagtaccgtgtggaagaacaactgcaccacggatttgttggtcagctttcttagggtcaacacctaaacggaatgcagcttctacagttgcatcaaatttagctgtgtttgttttctttactaattctactgcttctgttgcagagtaagcagctgcacgatcaacaagctttgcagcttctacgtactttttacctcttttagccatttttatttcctcctcgaatgtggttttagcggaataacctcccacgtttacgcctgttttcaggtataacctgaggatgagcgccatccatttatttaaaaacgataatcatttacgataataaaggttgcgaattggaattccagacccgcaaccttttttaaaaacaaatcgaattagtcttcgataacgatgcccatactgcgtgcagtaccttcaaccatacgcattgcagcttctacgctagcagcgtttaggtcaggcattttagtttcagcgatttcgcgtactttatcacgcttaacagttgccactttattacggtttggttcaccagaaccagactcaataccagctactttcttaagaagaacagcagcaggaggagttttagtaatgaaagtgaatgaacggtcctcaaataccgtaatttcaacagggatgataagaccagcttgatctgctgtacgagcgttaaactctttacagaagcccatgatgttaacacctgcttgtcctaatgctggaccaactggtggagctgggttagctttacctgcaggaatttgaagctttaccattttaattacctttttagccacgagacacacctccttaagtccgtgatgtggtcaattggacagtgatttgccctcccacgtcatattttatctgtaaggataaaatctttcaaaaaacgtctccgataacgaagacgtactgacttaaaagatattatcactttttacaattcatttcaagtttcattttataatttttcaatttgatggaagtcaagttcaactggagtctcgcgaccaaacatatccacaagcacgctaacctttttcttctccacatcaatttcttcaatagcacctgtataatctgcgaatggcccctcatttacacgtactgtctcatgaagttcaaagtcgaaatcaaccacttcgttgtccattcccatatgtttcataatggtaacaacttcctcttctaatagaggtgatggtttagatccagaaccagaagaaccaacgaacccagttacacccggcgtgttacgtacaacataccaagagtcatcagtcatgattaattctactaatacataacctgggaacacttttcttttcattaatttttcttttccgtttttcatttctacttctacttcttccgggacaacaacacggaaaattttatcttgcatacccattgattctacacgtttctctaggtttgcttttactttattttcatatccagaataagtatggacaacataccaacttttttccattcatttaggacgagcgtccttccctccctgacgtacatttttttgcgcaaatgaaaaaacccgttcaccgggcttttacacagttcttataaataacattatatcatggataagtgcttcttattcaagaattaaccaagaattaaccgaattaaagaagaaatgcccatatcaactactgcgaagaaaatcgcaaagaacacaactgtagcaacaacagtcgctgttgagcggagtaattcatcttttttaggccaacttacttttttcatttcgcgacctacatcgccgaaaaagttcgttaaacgcatctgcgggacctccagtgtattatttcaattatttattttgtttccttgtgaactgtatgctgattgcatgttttacaaaacttttttatttcaagtcgctctattgagctcgtatctttcatagtagagtagtttcgatttttacactcttcacatgagagtacaacttttttcctcattagttacaccaaccttgtaacattatgtccctaaaaatgtatcatacaataaaagacaatgtcaatgacatgcattttgtactctctacaaaagaaaacaggtgatttattttacacctgcagcacttgttacttcttatgaatttaaagttgtactttctctcatttccatatatcgttccaatttcctctttactctttgtaaagcgttatcaatagatttcacatgcctgtttaactgttctgaaatctcttgataagaacgaccatctaaatataaagaaagcactttcctttctaaatcgcttaataattcagatatttttgattctatgtctgtatattcttcctggctaatgatcatctcttcaggatcagtcaccttcgcttcagaaataacatccaataacgttcgatcagattcctcatcgtaaatcggcttatctaaagacacatacgaatttaaaggaatatgtttttgtcttgttgccgttttaatagcggtaataatttgtcgagtgatacatagttcagcaaatgctttgaatgaagacagcttgtcctctttataatcacgaattgctttaaacaaccctatcataccttcttgaacaatgtcttctcgatcggcacccactaaaaagtaagatcttgatttcgcacgaacaaagttcttatacttgtgaattaaatattctagagcgtcagtattaccttttcgaactaactcaacgattgcctcatcctctaaatcacgaaatgtaacgtcgcctatacttacgaagcctgcttccaccttgatccctccgaccgctatttatttagcaatattatacagtaaaaagataaagagcgtcaatgcttcaacgctctcctcttcttaatttttctaatttttctgtaatatccttactaaatatctttcgcatggcgggctgctgttctttcgtgtcttttgtacgccttcttacttgttgttccatcgcttgtacttccaactctaattcacgcgcagattttcgaagggcaccttgcccaaatataacccattgttctgtataatcagaagtcgcaacatatatttgtgtatttatatttctaagctctatcgcaagttgctctatcttttcgtctgcagtttgattctttcgtgtgaatattacttctacacgagattgtttcatctttttttcaataccatggactgtataggcatcaaagactatcatcacttttgtgcctgtataaccttgataatccgccatcttatcaataagcgcatctcttgatgattgtaaatctacatcccgcagtttcttcaaatctccccaagctccgataatgttgtagccgtcaacgattaaaatatcgttcattttttatttaccaatttcgtgacgtttacgatatacctcatacattaacaaacttgcggctactgaagcatttaaggatgtaactttaccaaccatcggtagagtgattaagaaatcacacttttcaccaataatacgactcataccttttccttcactaccaattactaatccaatcggcattgtaccatctaaattacggtaatccgttttccctttggcatctgtaccagcaatccaaagtccacgctcttttaattcatcaattgtacgagataagtttgttacgcgcgcaacaggaatgtattcaatcgctcctgttgatgctttcgcaactgatgcggtaagtcccacagctcttctcttcggaataataattccatgagctcctgttgcatcagcagtacgcataatagaacctagattatgcggatcttcaatctcatctaaaatcaagaagaacggatcttcattacgtttttctgccactttgaataaatcttctaactctgcatactgatatgcagctacttgagcaattacaccttgatgattaccctcaactaattgatctaactttttctttggtgcatgttgtaaaataatcttattttctttcgctaacgctagtacaatttgtacttgtcctttggcagcaccttctgcgatccaaattttattaatatctctccctgatcttaacgcttcaattacagggttacgtccgataatatattcactagtcatgatgatgtgcccccttccttttcttctaaaactgcaattgccttatatacaatttcgtctaatctttcacgattatttaataaatgatgataaccaattagtgcttcaaaggctgtactatgtcgatatgtttgtacatccgtatttttcggaactgtacctgaatttgcattacgccctcttcttaataccgcctcttcttcctctgtcaaaaatgccgtctctaataaatgataaacaactttcgcctgtgcttttgctgaaacaaagctcgtccctaagcgatgtaattgattagggcgaacttttcctttttgaaggaggtgatagcggatatattgttcatataccgcatcacccatatacgctaacgccaagctgtttaattgctttgcatcaatcatccttatcctcttttccatcttgtaccttgagcggtatcttctaaaataatattacgttcttttaaatcgtcacgaatttgatcagacaatgcgaaatcgcgatttttacgagcttcaatgcgcttttggataagctcttcaatttctttatccagtaattcttcttttgataattctaatcctaaaatatcaaataacgtttccagttgttttacgtatgcttcaatcacaactttagatgtatgctcttcaagtaaatattgatttgcatgatttgctacgttgtataattcggtaattgcatttgcagtgttaaagtcatcattcattgcctcttcaaatgcagtctggaatttctctatttcagctaaccatttctcattatggtccgttaaatccgtactactctccatacgatgctttaagtttccataagctgttttaattctttccagtccattattcgtactttgtaataactcttcactaaagttaatcgggtgacgatagtgtactgataacataaagaatctaattaactgcgggtcgtattgcttaataatatcgtgaactaaaataaagttacccagcgatttagacatcttctcattgttaatattaatatatccattatgcatccagtaacgtgcaaacgtttttccagtcaatgcctctgactgcgcaatttcattttcatgatgcgggaacgccaagtcttgcccaccagcatgaatgtcaattgtatcccctaaatacttacgcgccattgctgagcattcaatatgccatcctggacgtccttgcccccaagggctttcccagaagatttctccttctttcgcagctttccataaagcaaaatcaagagggtcttgtttcttttcccctacctcaatacgagcaccgtgacgtaaatctgcgattggttgatgtgataatttaccgtaaccttcgaattccttcgtcttaaagtacacatcaccctctgattcatatgcataccctttattcacaagttcttgaataaattcaataatgatatccatattttctgttacacgaggatgaactgttgcgtgtttgcaacctagtgctgttacatcttcaaagtacgcttcaacaaaacgatcagcaatcgttggtacatcttcacctaattcatttgccgctttaattaatttatcatctacgtccgtaaagttagatacatattgcacatcgtatcctttgtattctaaataacgacgcactgtatcgaataccataggaggtcttgcattcccaatatgaatgtagttataaactgtaggtccgcatacatacatctttaccttattttcttctaatggaacaaactcttctttttgacgtgttaacgtattataaatgtgaatagtcatttttatccttcctttctacctttaattccaattgtttcttcaatttatcaagttctacttccatagcctttaatttatcaaaaatcggatctggaaggtcagagtgatttaattcttgaccaatctttactccattttgaataacgacacggccaggtatacctacaactgtagaatgtgcaggaacttcttttaatacgacagaccctgctccgattttagaattctctcccacagtaatagacccaagaactttagcacccgtcgcaattaatacattatcctgaattgttgggtgcctcttccctttttcttttcctgtaccacctaatgtaaccccttgataaatcgttacattatcaccaatttcacaagtttctccaattacaactcccattccatgatctataaaaaagcgtcgaccaatagttgctcctggatggatctcaatgccagtaaaaaagcggctcacttgtgaaacaaaacgtgcaagaaagaaaaaatttcttttataaaaagcatgtgcaattcgatgggcccaaactgcatgtaatccagagtaagttaaaatgacttcgaaataacctcttgccgctggatcctgttcaaaaacgacttcaatatcttcccgaagcctcttaaacatcggtgttccctcccctttatgggctgcttttttgtcgaacgaactaactcccctaactcatcacttctcccctaattctttatataaggagataaattctatattcatacctatttacacggtataaaaaaaaggcgtctctgtcatattgacagagacgccttttaagcgcggttccactctgtttaggcttaaaaaagcctcaaactcatccatgataacggtgtacaccgctcctgcttactttgcggcctaagacatcccacgaagcaattcgctgttcagcagaagactcgaaggggcatttcaaaaatccgcttataaaccactcccagcctaaaggtggttctctctgtaaaaagcctgattttctacttctccttctcgtcgcttttccttattaggttttaggtatacttattatatttctaaacctagaaaatgttaaccaattactttttgaagacgatttaaaactttttcttttccaagaagtgcaatagcattcggaagctctggaccatgcgtttgtcctgtagttgcaacacggattggcataaataaatttttacctttatgtcctgtttccttttgaactgctttaatcgctgccttaattgctgctggctccattgcttctagagcttctatttgaccagcaaatgcacgaagtacttcaggtacttgttcaccatttaatacttcttgtccttcttcttcatagtcaacatgatctttaaagaacatttcagaaagctctacaatttcagctccaaaactcatttgttcatggtataaagcaattacatcacgaatccaagcttggtcttgttcgcttaaagtttctcccacacgtccagctttcactaaatgcggtaagcttaactctacaaccgtatctaaatcttgctttttcatatactggttgttcatccattttagtttttgagaatcaaataatgcaggtgattttgataaacgagctgcatcgaacattttgataaactcatctttagagaagatttcttcttctcctaccggagaccaacctagtagtgcaataaagttaaagattgcttctggaagatacccaagctctttatattgctcaataaattgaataatagattcatcacgcttacttaactttttacgactttcattaacaattagagtcatatgaccgaattgtggaatatcccagccgaaagcttcataaatcatcatttgtttcggtgtatttgaaatatgatcatcaccacgaagtacatgtgtaatttccattagatgatcatctactgctactgcaaagttataagttggaattccatcttttttcacaataacaaaatcaccgaaatcatttgaatggaacgcaacttcatcttttacaatatctttgaatgtgtagtcacgatcagctggtacacggaaacgaatacttggaatacgtccctcagcttcaaattctttcacttgttcttcagttaattcacggtggttacctgcgtaacgaggtgtttcaccgcgagcgatttgtccttcacgctctgcttctagctcttcttctgtcatataacatttataagctagaccacgctctaataaatcttcatataattttttataaatatctaaacgctctgtttggcgatatggtccaaattcaccaccaacatcaacaccttcatcccagtccataccgagccatttcaagtattttaattggctttcttctccaccagccacgttacgttttacatcagtatcttcaatacgaataataaatttgccatctaaatgacgagcaaataaataattaaataatgccgtacgcgcatttccgatatgtaagtgtcctgttggacttggcgcgtagcgtactctcacttgcttttccataattggtacaccttccatccttaatgtcaacacattctataattgtacaccaaaaaaatgtgattatccatcttacgaattaaaaaccattattttttctgtaataaaacaaccgcttgagaagcaatcccttcttctctacctgtaaatcctaatttttctgttgttgttgcctttacattaatgttatcgatagacgtttctaacagttcactaatgcgcttacgcatgctctcaatatgtggtgccatttttggttgttgagcaataattgtacaatctaaatttcctaactcgtaaccttgttcacgcacaaattcccaaactttttgtaacaatacagctgaatctgcatctttaaaagctgggtctgtatcaggaaagtgctttccgatatctcctgctgcaatcgcacctaaacatgcatcagcaatcgtatgtaacaatacatctgcatctgaatgaccgattaatcctttctcgtgtggaattgtaattccaccaataatcaacgggcgcccttccgcaaattcatgtacatcaaaaccttgtccaattcgaaacatccttacttcctccttaagctaaactactgagctttatgactctatattatatcgctatccttataaagaaaagcccggctgttgccgagcttttctttattaacacatcatcaacgttatttcttctgaacacgtaggaaactttcagcaattaatagatcttccggagtcgtcactttaatattatagtaactcccctctactacacctacttgcttcccaacacgttctacgagacttgcatcatctgtgccaagaaaacaactttgctttgcgcttctatgagcttctagcaaaagagaaacagagaatccttgtggtgtttgtacagcgttaagttgagatcgctctaccgtttctacaacaacaccctgctctactttcttaacagtatcttttactggcactgcacaaatggaagctccatatttttctgctgcaattaatacatcgcgaatcactttattcgttacgaacgggcgcgccccgtcatgcacaagaacatattcgacaccactcgcatactgaagtgcgttatatacgctatcttgtctttcggctccaccctgaataaattgtacgtgcttttcaatctggtacttctgcattaactcttcaaaatacgggcgttcttcttcgttaattgccataataatacttttgcacgctttatctttttcaaaagcacgcaatgtgtgcacaataattggtacttcatctataagtaaaaataacttatttttaccagcacccattcgttttccttggcccgctgccggaataattaatgtatacatattaataatcctctacttataatgctttttctagcaatttacgttttgcaaaaatcatacgaccagccgatgtttgtaatacgctagtaacaagtacgtcaagttgtgaacccacatactctctaccatcttctactacaatcatcgtaccatcatctaagtatgcaacaccttgattttgttctttaccatctttcacaacataaacacttaattcttcaccagggagtacgactggtttaatcgcattagctaaatcattaatgtttaacaccgtaaccccttgtaattcagaaactttgtttaaattgaaatcgtttgttactacagttccaccagtgatttttgccaactttacaagcttgctatctacttcttggatatcatcgaaatcgccttcataaatttctaccggaattggcatctccttttgaatacgatttaaaatgtctagccctctgcggccacgattacgctttaaagcatctgaagaatcggcaatatgctgaagctcttctaatacgaattgcggaatgacaattgttccttctaaaaactttgtttggcaaatatctgcaatacgtccgtcaataattacactcgtatcgagaattttccaatgagtcgtagatttttctgcttcgacctctacctcttcattctcactattgtttttcttcttacctccgcgttggggtaatgtaaataatcctagcaattcattcctctttttaaatcctacttggaatcctaaatatccaagtaaaagggtgaagaacacttgcaacaccgtactaataactggaattgtaaattcacgaattggtatcaaaattaaatatgcaacaataagaccagagattaatcctaatgtaccaaataaaacatctgctacaggcgcctttacaagagcctcttcaatatgcttaataagttgaacaatataatctacaagccaaaatgttgttaaaaataaaataattgcaccaataattgcacgaacatacgatccttccaacaaaggaaccgcaccgatatctaatacattaataatttttgggattaagtaaatccctaacgctcccccgatcactaaaaagaagagctgtacaatccgttttaacatccaaccacctcctactcattattaaccattgtttcgctaatcaaaacgccgaatgcaaaagcggacgtgtttttttgtaaatagttttatttaccaatatatcatatcatataccaaaaatgttctagtgtcgttatattatagaatcaatgtaatattcttaattgtgtctactcatatagagatgctcttgaattctttttagaccttctcgtattttcttcgctctcacttctccaattccttccacatcatccaattcattaatagttgctcggcaaacaccttgcaatgttttaaatcgattaattaaattctcgataataagtggcggaacacgagaaatcttgcttgtgattcggtaccctctaggtgtcacactttcttctaaacttgtttgtcctggatacccaagtaatttaactaaatcactatcctctaaaagttgtgtatttgcaagatcttgtaactttttcaagatttgatgatggtcttgtgttttctcctggtgataatctttaattaacaatgctgcctctgcctctaaatcagctagtaattctgtaagctgtaaacgaattaacctaccttctgttcctagctcatgaatatagctcaatatttcattttttatacgcagcaccatttcaacactatgtaaaacgtgaaccacctcggacattgtaacgacctcttcaaattctagaatacccaaattcgtaatgccgtcattccatacagccttatatttttctagcgtttgaattgcttgatttgccttcgttaaaatgacacctatatcttttagtgtataacgtaagttcccttgatatagcgtaattacattacgtctttgtgaaatggccacaacaaggctgcccgtctgctttgctacacgctctgctgttcggtgacgcatacctgtttcaatagaatcaatagatgaatccggaactaactgtgcgtttgcaattaaaattttacttccagtttcatttaaaataagtgctccatccatttttgctaattcatataaactagcaggagagaatgcgcaattaatatgaaaaccaccatcaacaatgcttttaatctgctcattatacccaagaacaattagtccccctgtttgtgcacgaagtacattatctatcccttcgcgcagtggtgttcccggggccacgagctgtaaaatattaattatacttttgacacgttgcttattttcttccatagcctagcctcctaatgtcaaacgaagcgcttctcctaaattagaaacacctacaacctcaatcccctctggaattgtccacccccctaaattttttctaggaatgatagcacgttgaaatcctaatttagctgcttcttgtacacgttgttcgattcttgatactcttcttatttctccagttaatccaacttctcctattaccgcatcagttggtgccgtagatttatctctaaaacttgaagctatacttaaggcaacagctaaatcaattgccggttcatctaatttcaaaccaccagctacttttaaatacgcatcttgattttgtaatagtaaacctgttcttttctctagtaccgccataataagcgagacacgattatgatcaattcctgtcgccattcttcgaggatttccaaaactagtaggggaaattaatgcctgtatttctactaaaactggtcttgttccttccattgaggcaactactgttgaacctgcaactccaactggtctttcctcaaggaaaatttcagaaggatttaagacttctgcaaggccaagttctttcatttcaaagatacccatttcattcgtagaaccaaaacgattctttacagctcgtaaaatacgatatgtatggtgtcgatctccttcaaagtaaagaactgcatcgaccatatgttctaacatacgcggccccgcaattgcaccttcttttgtcacatgtcctacgatgaaaattgggattccctttgtttttgcaagtttcattaattctgctgtacattcacgtacttgcgccacgctaccaggagctgatgtcacctcaggtaaatgtatcgtttgaatagaatcaataacaacaaaagcaggattcatctcttcaatatgtgctgcaatacgctgtaaatctgtctctgatacaacaaatagattactaccatttacatgtaaacgatctgcacgaagtttaatctgctttgctgactcctcacctgatatatacaatacatcatatgaagcatctgctaattgcgaggaaatctgtaataataacgttgattttccaatcccagggtccccaccaataagtactaaagatccatctacaattccgccacctagtacacggttaaactcctgaaattttgtttcaatacgtgcctcagactttgtttctacttctgtaagacgtcttggttttgttacttctgtttgaattgcatttgcataatttaggcgtctggatgatacaacgggttccatctcttcaacaagcgaattccattgaccacaccctggacatttacccatatattttggtgattgataaccacactcttgacatgtgaattttgttttctttttagccatatctttttatatttcacttcgctttcatctataaacatttgaccttctcgtacaagaaagagggctatctcgtagccctcttagtttgtctatacttattttaccttttcagcactatgaatgacaaatgtttccccttctacatcaaagataactttttgtcctttctcaatagcaccttttaaaagttcttccgatagtctatcttctacatgcttctgaattgctctacgtagtggacgagcaccatattcacgatcaaaccctttatcagcaatagctgcaatcgccccttctgttaattgcaattcaatttcttgttcttttaagcgattcactaactgatttaccataagagtcacaatttcttgaatatgttttttctcaagcatatggaatacgataatttcatcaatacggtttaagaattctggacgaaatgcctttttcagctcatccattactttacctttcatatccgaataatcacgactttcatcttgtacgttaaatccaagatgtttgttacgttttaacgcctcagcaccaacgttagacgtcataataacaatcgtattacggaagtcaactgtacgtcctttagaatcagttaaacgaccatcttccaatacctgtagtaaaatattaaatacatcaggatgcgccttctctacttcatctaataggacaactgaatacggcttacgacgaaccttctctgttaattgtccgccttcttcatacccaacatatcctggaggagaaccaactaagcgagaagttgaatgtttctccatatactcagacatatcaatgcgaatcattgcatcctcatcaccgaacatagattctgccaatgctcttgctaattctgttttacctacacctgttggtcctaagaaaataaatgaaccaattggacgtttcggatctttcagtcctgctcttgcacgacgaacagctttcgctacagccactaccgcttcatcctggccgatgacacgatcatgaagaatggattctaagtttaataatttatcagtctctgtttgtgcaagtttagaaacagggatacgtgtccatgtagaaacgacatttgcaatatcttctaccgtaacctctgaattttcttttccttgttgttctttccactgacgctttgtatcttccaatttctcacgtaagcgttgttccatatcacgtaaggaagcagccttttcaaactcttgactttgtacagccgcatctttttcttttcgaatttcctcaagattcacttcaagctcttttaagtttggtggtgttgtataagaacgtaagcgaacctttgaagcagcttcatcaattaaatcaattgctttatctggtaagaaacgatccgtaatataacgatcggaaagtttcacagctgcatcaattgcatcatctgtaatagacacacggtgatgggcctcataacgatcgcgtaaacctttcaagatttgagttgattcttctagactcggctcatcaacatgaattggctggaaacgtctctctaaagctgcatccttttcaatatatttacgatactcatctaaagttgtcgcaccaatacattgtaattctccgcgtgctaaagatggttttaaaatatttgatgcatcgattgcaccttctgctccacctgcaccgattaatgtatgaagttcatcaataaatagaataatattccctgcttgacgtatttcatccattactttctttaaacgatcttcaaactcaccacgatatttcgtcccagctaccactgttcccatatctagtgtcataacacgcttatctcttaacgtttcaggaacttcattatttacgatttgctgtgctaacccttcagcaattgctgttttacctacaccaggctctccaattaacactggattgttttttgttctacggcttaacacttcaattacacgttgaatttctttactacgtccaataacaggatccaaacgattctcacgtgcaacaactgttaagtcgcgcgctaaactgtctagtgtcggtgtattggcatttgtcgatgaaccaccttggtgacctgaacttgcctcgttacttccaagaagttgtaacacttgttgtcttgctttgttaaggctgacgcctaaattatttaaaacacgtgccgctacaccttcaccttcacggattaagccaagtaaaatatgttctgttccaacgtaagaatgtcctagcttacgcgcttcatccatagacaattcaataacttttttagcacgaggtgtataatgtacagtttgagaagcttctgttccacgtccaattaacgcttctacctctttttgcactttctccgggctcaatccaagagcaattaacgcttttgctgcaattccttcaccttcgcgtacaagcccaagtaaaatatgttctgttccaatattattatgcccaatgcgaattgcttcctcttgagataaagctaatactttctgtgctctttctgtaaatcttccaaacatcatagaaatcgcctcctacttgcgcttagtttttttcaatacgtaatcgctcacggattaaggttgctcttcgataatctctttcttctggtcctaaaggtcctcctgcgtattgttgtaaaatacctggttgcgtaagaaccattagctcagtcaaaatatttctcgatataccttttatatatcctagatcaataccaagtcgtacatccgataagcaagttgccgcttctgcagattgaattaaacgactatttgctagtataccgtaagaacgataaaccttatcttcaagctcaatactcgaattttgtacaattaattctctggccaatttttcttgttgtataatttgctgcatgacactctttaaatctgcaataatatcttcttcggatttccctagcgtcatttgatttgatacttgaaatatattacctaacgcttcgctaccttcaccgtatattcctcttactactaaacctaatttttgaattacttgtataatacggctaattctttttgttaaaaccagccctggtaaatgaatcattacagaagctcttaatcctgtaccaacgttagtaggacaactcgtaatatatccaagtgattcatcaaaagcatattcaacctctttctcaatccaattatctatttgattggcgctttgaagcgcctttgataactgtagtcctggaaataggcactgaatcctaatgtggtcttcctcattaagcatcacactaatgtgttcgctttctgataacagacatgctccatattcagtccctgctagatttggactaattaaatgcttttcgactaaaactctcctttgaagaggcgttaattcattcatttttaatagtccaaacttcccaaagggctctaccgctttatttataaatttctttttaaataattcttgaaccttttgagcttcctcttcgttttgcatagtagaaaattgatattgcttaaaattacgagccaaacgaattcgactacttaaaacaatatcagaatcagggccatcccccttcatccatggactaatcgcttcattcataattttgtccagtgacatagaactactccccctctctatgctcactaagctgagtttcaagccctcgaatttcatctcttacctcagcagctttctcaaactcctcattctgtacatattgtttcagaataagttttagttcatctaattctttctttaagtggatatttccttccattcgttccggaatttttccacaatgttctgtatgtccaccatgaagtcgttttaacaatgggtttaagtgtcctttaaatgtatcgtaacaagaagcacaaccaaggcgtcccacctttgtaaaatgttcgtatgtcatcttacaacctggacatcttattgtatttgtatttgaaaacccgttttttccttctccaaacattgttgattcaccgtgtaataaaccagcaaatacatcatgaaatgaaaagttagactgtgatgattgaaagaaagacgtatagccactttgctctgcacattgctcacaaagatgaacttccgccttcttctcgttgattacttttgtataatgtaaagttgctggtcttatattacagttttgacaagtcatcaatatccccacctttacaacaggaacgatctacctcatgatacttttcatacattactagattgtcctctttccttaatccatttagataaaagtacatgctctttttcaaaacttctacaatatttaactgccctatcttaattatcattcttttacaaaagctgtatttatttatatttcagtgttcttaacattgcgcataatattcgagccctaagttcatctcgagaaggaatatccattgataatacagaacgatctagtacacttaacattagttttgcttcacggcctgttatgattccctcttctaataaacgtataatcatactctctgcattcccttgtgcaacgctatgatcaatcatatgaagcatttgatcaataatgtctatatcatcatgcagtttgacttttataatgcgaatgtaacctcctccaccacgtttactttctactacaaatcctctttctaatgtaaaacgggtattgattacataattgatttgagatggtacgcactcgaatcgatccgcaatctcatttcttttgatttcaatcacattattattacttaagtcaataacttgctttagatattgctcaatgatatcagatatatttctcatttatccgccacctttattgactttgactatctttgactttaattatatacgtattaataaaatttgcaactcttttgcttattcactatcctagccacattcccctgcatttaatcaaaatagtaattatttaagcacatttttttaattactatggattataaaagaaaacacgaaaaaacacgagtcatttgactcgtgtttagttgcttggcgacgtcctactctcacagggacaaggtcccaactaccatcggcgctagagagcttaacttccgtgttcggtatgggaacgggtgtgacctctctgccatcatcaccaaactatgaaggcatattccttcaaaactagataacattgctacatattatatggttaagtcctcgatctattagtattcgtcagctccacatgtcactcacgggtttataggtaaatccctttcctaaaaaacctaactttatcatacgaggcggtgacactatgaagtatgtaaaagttagtatgaatggtggaagtgaacataaattctcaatgactttagatcggtttaaagaacttattactacagagaatgggatattagaaaataaattagtatgtattgaaaatgtaatgattaatcctactaatatatcttctgtagttgaaaaaattggtgtaccggctaagtttatggaagcttaaaatgttagataaaaaacatccattagggatgttttttaatttataaatatgataatcgtacagtaaatatttgagtagattttatagcaatgactatgcatatattaagtacctgaacatggttcttaatacatgcacgaaataataagtacaagcatatattatatagtaggacaagatcttcgtgtcctacttaatactcagaaaaaacctctaatcacataagagcatccaattgcagggtgctcttattttttatgaaaatctactacgagtcttattttatagtaggatgcaataataaagggctattttgaaatagtgttctttagtctttaatgttaaatttatctttaacgttaataaatattaaaaataatatgatagcagaaattaagttagataagtagaaattttgatgaaacagtagttcgaagatgacatagaaagtaacgaataaggcaatagcaggtagtatgcaaataaatataaatctccaattttttaagtaatgtttataattagtaagtactttctccataaatatagctcctatatttttgtttttatataattatacatttagatacaaagattttcaaagtaaaatatttagcaattcaaaaatataaggagagcttttgttgaaaatccagattgctgtagcaatctggatttgactttaaagaactatactaaaatgatacactataatctacgttatttttgaaatgaatagagggatttgtgtgatagataaaattaaaaatgctgtagaggatatgtacgaagatgaggctaaagatttacttcaaagtattctcatacagttaaacttattagaagaaaactatagtgaagatacaattaaaaatttgatggatattccgaaacaattaacgagtaatcctacttataaagggaatgtaaaagaaagtacgcacgtacatattgcttttgatgattcaacggctggttgcttaaaatatatgttaagtcaagaagaattatttgaagagagtgttgttgctttttcggaattcttttcaattggaccgatatataggttgcatacgaatgaggggcaactagtaagacagaagtggttaataaataacttaactgcttatgatagttattttgaagaagaatatttatcaagatttatagcaactatagaagaactacatactattcctgttgaaacgcctattacaatttggaaggctgataatgcacatgaacatgtaggcctaagttttgtaatggcacaattaaaggataagaaaaacattcgagttattaatacgtctgaagcaagtagagaaatattaaaacaagagtatgatattcgtggaacgggagaattaccacctgaaagtttagctctattccaaaaaagttttataaagctaccttatttaactgaagagaagcgcatgaagtttgaaaatgagtgggatagattatcggaaagcatagaatgtttaagagtttggaaagaaaatgaagtgcattctgtacaggaagattattttgatcaatttataattgaatgcgcgaaaagtgtgggtgctgatcgagagttccttaaagctcctagagtaattggtgaagcacttggtcttgttgaacagttagttggagatactttcttagaatatcgcttgaaacaattaattaaacaagaagtatttgaatttgaaggttcgttagatgaaatgcgtttttatagtgtgaagttaaggaaataataaacacattctatttttgaaaggctcgtatttttaataatacgagctttttaagttgaatttgggctatacataagcttcccagagagggcatatcacatatgaatggtaaaggtaatgaatgaaaagaaggtgatttgttaatatgtataaccaacaaaattatccatatgatcaagcgatgtattataatccacatgactacgggtatgaacctacaaatgaagtgagagatattgaacaagaagattacagaccagatgatgcagaagatgctccaacgtcaccacctccgtcacaagcgccgtcgttaccgtctacatttgcttctccagcacaaccaggtaatatgaaatcatggatgtgtaactgtctaggaagatggggctatttacgcttacatcgtcctggtcctttcggaagagatttatggttcttcccgactgaagtgagaagaaatggagtgtcaggttacacgtggcaaggtggtcgtcgtcgtaaagtaagttatcgctatcaacaaattagtaattttatgtgcttcgcataaagagaagtgggagagtgaaacgattttactctctcacttttttatttttcaatatacgaagtaagattttgattaaaaatttacaattttcacgtttttattagagtataatgcatatgttgggttgattttcaaaaacaaatgagagtgagggaatacaatgtcaatgaaaaacaaagttgggttaagcatagaggatggcattaatttagcttcagctcagtttaaagaagatgcgtatgaaatttataaagaatcgcgaaaaaaacaacctatattatttgtaaaccaagttgaaatcggtaaagaatggctcattactagatatgaagatgctctgccacttttaaaagataatcgtttaaaaaaagattggacaaatgtgttttctcaagatataaagaacatgtatctttccgttgataatagtgaccacttaacaacacatatgctaaattcagatccacctaaccacagtcgtttacgatctttagttcaaaaagcttttacaccgaagatgattgcacaattagacaaaagaattgagaaaatagcagatgatttgataagtgatatagagcgaaaaggtacattaaatcttgtggatgattattcatttccattaccgattattgtaataagtgagatgctcggtattccaaaagaagatcaagcgaaatttagaatttggtctcatgctgttattgcatcaccagaaacacctgaagaaataaaagagaccgaaaaacaactatctgagtttattacatatcttcaatatttagttgatattaaacgaaaagagccaaaagaagacttagtgagtgctttaatacttgcagagagtgaagggcataaacttagcgctcgggaactatattcaatgataatgctattaattgtagcaggacacgagacgacagtgaatttaattacaaatacggtattagcacttcttgaaaatccaaatcaattacagttattaaaagataatccaaaactaattgattcggctattgaggaaggattgcgttattattctccagttgaggttacaactgcaagatgggcagcggaaccttttcaaattcacgaccgaacaatcgaaaaaggagatatggttgtcattgccttagcttctgcaaatcgtgatgaaactgtatttgaaaacccagaagtattcgatattactcgggaaaataatcgtcatattgcctttggtcatggtagccatttctgtttaggcgctccacttgcgaggttagaagcaaagattgctattactactttgtttaatcgaatgcctgaactacaaataaaagggaatcgtgaagaaattaaatggcaaggtaactatttaatgcgttctttagaggaattgcctttaactttctagaatagttaaaaggagacatgcatacatcgaaaatgatttacatagagtatgtatgtgttatttaaattcgaaacggaagggtgaaaacatcccaatgatcaactaattctatttgtaagagatcttcgttaaaaaacgaaatattcttctgaatagggttagtctgtacatttatagaaaagggatgtatttcgctctgcgaatatatagtctttttatatgatttgtgctgcctcctgttcagaacatgaaataggaggcttttttatgtcgacaaatgtagtaacgaaacaaaacaatggggtatcacaagtattaaaaaatcggtttgttcaagggattttagcatcagcattatttttacaaataggaatatgggttcgaaactttgcggtattactatatgtaatggaaatgacaaaaggtgatgcttttgctatttcgatgatttcagttgctgaattcgctccaatttttattttttcatttattggcggtacttttgctgataggtggaagccaaagaagacaatgatatggtgtgaaacgttaagttccatttcagtattcgctgtattaattacgcttatgtttggaacgtggaaaattgtgttttttgtgacactcatctctgcaatcctttcacagttttcacaaccatctggaatgaagttgtttaaacaacatttatcaacggaacaaattcaattagcaatgtctatatatcaaacgatatttgcaatatttatggtattaggaccaatactagggacatttatctttcatagttttggaatttatatttcaatcatcataacaggtatttcgtttttacttgcggcagttgtattgttattccttccgaaagatcttgaaaacgacgtagaaaagaaggatatcactctgttgcaggagatgaaggatggtattaagtatgtcaaaaagaaaaaagcattaactttgctagggctttgttttatggctgcaggactaggtataggattaattcagccattaggtatatttattgtgactgagcagttaggattatcaaaagagagtttacagtggctactaacagtaaatggtgcgggaatgattgttggcggagcattagcaatggtatttgcgaaaaacgttgctccgcaaaagatgttaattatcggtatgcttggtcaagcaattggtattggcattataggatattctacaaatttatgggtgacacttacagcgcagctttttagtggtttagctcttccttgtatccaaattggtattaatacgcttattattcaaaatagcgataccgattttataggtcgtgtaaatggtattttaagtccgctttttaccggttcaatggtagtaacgatgagtatagctggctcattaaaagagatgttttcattaagtatgatgtatgaagggacggctttactttttataattggattattgtttattttacctatatacaatttaaagccagtaatagcggtagaaagtgaaataagtggtaaaggaagtgctatacaaaatgaatcctaatccaaatgttaaataccctattgaaggcaatcaaaacgttcaatttataaaaaatataataacaaaacctaatatacttgttggtgactattcttattatgatgcgaaagatggagaaacatttgaagatcgagtattacatcattatgaatttcttggagatcgccttactattggaaagttttgttgtattgcatctggagttaactttattatgaacggagccaatcatcggatggatggattttcggcatatccatttaatatatttggaaatgggtgggagaagtatacacctagtttgtctgatttaccttataaaggtgatacagttataggaaatgacgtttggattggtatggatacaacaattatgcccggaataaaaataggggatggtgcaatcattgcagctaaatctgttgtgactagagacgtcgcaccatatacaattgttggtggaaaccctgcaaataaaataaaagagagattttcaaatgaaataattcaagaattattgcaaattcaatggtggcattttgatattgaaaaaataactggaaatattgatgctattgtacgcggagatattgaaccattaagaaagctaaaaagggaatgaaaaatggatgacaaatagtatcatacctccgaattttgttaatgataatagaacaaggaggtgtgatactatggcacaagacgttttatgtgaagtaaacaactgtaaattttgggcgaacggtaataaatgtagtgcagaggcaatttacgtagtaagtcataaaggtaaacatgcatctacaacggaagaaacagattgcaaaacatttgatccagaagtgtaaattctttaagggtagccaaatcgtggttgcccttttattaatgatagtattgataataaatatcattttcattcattaattttagctttttttgttattttttcatattttcttcataagtgatgtaatccaactcaattcatgttcaattcgtgatttactaaattcaatgacttcagtaataaaggctgaggtaacctctagagactgaatagcggtaagttgactatgtagtacgttttgacgtacagtcaaaatctcttttctagcttcatattcaagtttttcaaatagcgcgatacgaacaagaaattctgcattatttgtcgcaagtttttcgggaaactctcgtaacatttcagaaaaaatttcttctcctgtttctgttatatcgtacatatttcggtttggttttccaacttgtttatgtatttttttcgttatagcacccatattttcaaagcgccgaagggcagggtaaagcatgttgtgatttaattcaaaattctcacctaaacgattttgaacattttttttgatttcatatccatgttttggtccggtcgttaattctgctagtagtaaaatatcaacgtacataaaaatcccccttatatatttctcaagttctctaatgaaaaatcccctttagtatatgttaaaataacatatgatagtttatacaactttgaactgccgacctatcacttttattgtaaaagaaaagggaggaaagaactatggcttcacctgaaaatgttattttagttcatgaaatttcaaagctgaaaacaaaagaagaattatggaatccatatgaatggtatcgtttgatgagggataatcacccagttcattatgatgaagagcaggatgtatggaatgtttttttatatgatgatgtaaatcgtgttttatcagattatcgcttattttcaagtagaagggagcgcagacaattctcaatccctcctttagaaactagaataaatataaactctacagatccaccagaacatcgcaatgtacgttccattgtttctaaggcatttactccaagaagtttagaacagtggaaacctcgaatacaggctatcgcagatgaacttgtacaacatatcgaaaaatgtagtgaagttaatatcgttgaacagtttgctgcacctttacctgttaccgttatttctgatttattaggagtcccaacaacagatcgtaaaaaaattaaagaatggtctgatattttatttatgccgtatagtaaagaaaagtttaatgatctggatgctgagaaagggatagcattaaatgaattcaaagcataccttctaccgattgttcaggaaaagagatatcatttaaccgatgatatcatttctgatttaattcgagctgaatatgaagacgaaagattaaccgatgaagaaattgtaaccttttcattaggtttactagcagctgggaatgaaaccactacaaatttaattattaatagcttttattgctttttagtagattcacctggaatttatgaagagttaagaaaagaacctaacttaatttcaaaagcgattgaggaagtattacgctatcgctttcctgttacattagcccggaggattacagaggatacaaatatatttggttctttaatgaaaaaggatcagatgattgttgcgtgggttagtgcagcgaatttagacgagaaaaaattttcacaagcctctcaatttaatgtacatcgaacaggaaatgaaaagcatttaacctttgggaaaggtcctcacttttgcttaggagcaccacttgcacgtttagaggctgagattgcattaactacctttataaatgcttttgaaaaaatagagctatctccatctttctgtttagaaaaatgtatattggaaaatgaacaaacattaaaatacttacctattcgattgaaagctaaataaaaatcttaacaaggtgcatacatttgcatcttgttttttgtttctcaattgtgagttttcggtaatcaccttaatatggaattgtataaaacgtagaggaggattcttatgttgacttgtaatggaagtaaatcatttcaaaagtttattaaaggtgttacagatcttatggaaaacggtttatttgaagaagaaatagtgtgtggcattgaaaagttactagaagaacttttagaaaagaaaacatggcttccgttagataaacagaaggccaatttgactcaatatgcacgacatttattgtatgaagatccgctcaaacgttttgaagtactagctctcgtatggaaagatggacaatctacacctttacatgatcatgacggcacatggggagtagaaggcgttttttcaggaaggattatggtgcagaactttatacaaacgaaacaacttggaaattcacttgtttatttaacacatacaggaaatctttatttgggagaaggagaaacagataaagtaattccaccagcggattgtcatattcttgaaattagcaaaaatgaaagcgttattacgattcatgtctatggaaaacggttagaaaagtttaaagtatatataccaactgaagaaaaaaatgtgtacatgtgtgagacaaaatacattagttataattcatagtttaaaatccaaagcttttttaaaaagaaaagctttggattttatttttaattatttcttgacctgaaacgcttttcataaattataaataagaagtacctcacgaggattgtatgaaaacgatacctaataattaattagaactcgtgtatttatagaaagtggtgaagaaataatgaaattaatcgcaattgatttagatggaactcttctttcggggaataaaatgataagtaaagaaaatgcagaagcaattcgaacatgtcaagaagctggccatgttgtagcaatttgtacaggacgttcaattgttgacattgagcgattattgttagaagttgatttagagtgtccaatcattgcggaaaatggtgctcttatatataaagataaaaaaatgatgaagagatatccaattcaaaatatgcaggcacttgaaattgtagaataccttgaagagaatggtttatattatcagctctataccgataaaggtgtgtatgtaccggattatggagtagagagtgtacgtaatgaaattgagcatgtgaagaattcaaaagaaaatttcgacttgaaagagttagaaacaatcgcagcattatatcttgagcatacagcgtttcatagtgcggaaagttgtaaaccaattgtagaaacagatatacatgtgcataaactattaccattttcttatgaaattgagaaattaaaaaaactcaaagaaacatttcttcataatacagatttagcaattacatcttcatattggcacaatttagagattaatcatcgagatgctcaaaaagggaatggattatatactttagcagaacatcttaatattccggttgaaaacactgtagcgataggtgatgggctaaacgatgtttctatgatggaaaaagcgaacatatcaattgcaatggggaatgcagtagaagaaataaaagcaatgtgtaaatacgaaacgttatcaaatgaagaacatggtgtggcacatgctttatataaatatgtaatgtaattaaaaaagaaaaaagaatccaaatggattcttttttcttttttattaggggtaaggtattctatgagattcatagaagccttattacattttattatatagaatatattggaataaatgtttatatttttcataaaaattgtgaatattttatgaactttatacttattgcatgtttataccgctattagtaacgtgtatgactctcaagtgaaaattcagtgaattgtaagaaggaattcaagttacctagacaataagtgaggaatcaacgaaatatatactaattaaaggtatattcagtatatatattcttttcttattttaattgaaaaataaaatttgttcgaataattattctacagctatataccttcactagctttcttcgtataatggagaagtatgaattttagatttgtattaattttacatattgaggtgaaaaaggaatgaattcgcggctaatggaacttattgatgtgagtacaatagaaaccatggcagaacaattttataaattaactaacatatcacatcagcttcttgatgctgaaaaagagtgtgttttttcattcggaatgaatgagataaaaaagagtaaacttccaaagattgaaatccccattttcttatacaatcaacatttaggatcttttgttgtatggtccaaaaaaagcgaaattttcagttgtcaaaaatactttgaaatgctctcaagtttaattttagatggcgcaataaaagtatttcaaagtaaaaatacaacgttgctttctcggaaagaggaggaactacatacgattttacaaaacatgcctgttatggtcgatgcgcttgattataatggagattttgttttgtggaatcgagaatgtgaaattgtaacaggttataccgctgaagaaataattggaaatcccaacgcactgcaattactgtatcctgattataattatcgccatcaaatacaaaagaaatttttaacttgtggaaaaaatttcagagattgggaaatgcacttaacatgtaaaaatggtgaaatcaaaacaataatgtggtcgaatatatcagaacagtttcctgtaacaggatatagttattgggctgttggtgtagatattacacatttaaaagcgatagaagagcagttaaaacaacaaacatctgaactggaattaatttttaaagctttaccagatttatgtttcttaacagaagatgatggcacaattatagattacaaggcaggatctcctacaaagttttacgtacccgcagaagcttttatgggaaaaaagttttacgaagtattaccatcttcagtagcacagcagtttcaggaagccattaatcaagtgaaggaaaaaggaacgaatgtaattgtagaatatccactcacacttaatggaagtattaatttctttgaggctaggtgcttaccattattacatgataaaattatgattattgtacgcgacattacagagagaaaaaagacagaagaattgctaaataaatcagatacgcttgcagcaattggtcaattagcagctggcgtggctcatgaagtaagaaatcctttaactgtaattaaaggttttatacagttatttcaaattaataaagaagatcaagaaaaatattttgatcttatgctctctgaaattgaaaggatagaagcgatcctgcaagaatttctggcaattgctaaaacagatgagataaatacagaaaagaaaaatatttatcaaatttttaaaaatgtcgtatcgttaatgaatacaaaagcaattatgacaaatattcaagttgaactatttacggatgacaaagatataattattgaatgctcagaaaatcaattgaaacaagtatttattaatattttgcaaaattcaatcgaagctatgccaaatggtggggaaatttcaattcacataaaagaaataaatgatgatggtgtcatcattcatgtaatagatgaaggaataggaatacctgaagaaagaattaagagattaggtgaacctttttatagtacgaaagaaaaagggactggtattggattaatgttaagttataaaattattgaaagtcatcaagggacaattagtatcatgagcgaggttggtgtcgggacaacagtaactatttacttaccgaaagtactaagtaaacaatctctttctaattgtgacgacaaatgtatagcaatacgcactagtagtaattcttaaatcaattaatacccaataacaaagcgattagtgaaaactaagctttttgttattgggtattttttatatttaatttagtaaactttaccttttctttacctttgttttaatttctattaagttttaaacattatattaatatttgtacaaagcaatgtatagaaattgtacattacttttaatatagaaatgtgattattatttgaaatattgtaaggaggagattatgacaaggtgaaaaagcaagagaagaaaagtggtagagtagtacctctccggttaaatattttattcctttgtgtatttttattattttctggcattattattcagttagggaaagtgcaaatttttgatggagaaacatataaaaatgaagtagagaagagagaaaatgcaaccgtgggcctttctgtaccacgtgggaaaatatttgatcgtgaaggaaatccagtagttgataataagtctttacgtacgattacatatacaaaggtgaaaggtgtaaaacaagaagaaatattaaaatcagcaagacaacttgcagatattattgaaatgccacaagaagatatagataagttaacggagactgataagaaagacttttggatgcaattaaatccagaacttgctcaagacttagtatcaaaaaaagaaatagataagttccgagataaggatattaccggaaaagagctagacaaaaaaatagaagatttaaaaaggaaacgcgttacagataaaaatcttcaagaactaacggctaaagatatagaagtgttagctattaaaagtaaaatgacctcaggttttcaaatggcacctcaaattattaaaaaggacgttagtgaacaggaatatgcggtgattagtgaaaatttagcgaaccttccaggagtagacgcatcagttgattgggagagaatctatgtaaatgatggattattccgttctgtccttggtaacgtctcaaatgctgatgaaggattgccacgtgaacgattagattattatttagtgcgtgattatagccgaaatgatagggtcggcaaaagttatatcgaacagcaatacgaagatgtacttcatggtacaaaaaaagaagtaagaagcattgctgataaacaaggaaatactattagaacggaaacggtttcggaaggaaaaagcggtaaaaatttaactttaacaatagatatggaattgcaaaaaaaagtagaggagagcatagaaaaaatattaaaacaatataaagggtcagaatcaatgttagaccgtgctttcgtagtgatgatgaatcctaaaaatggccaagtattatcaatggctgggaaaagacttgtagaaaaagatgggaaaatggaagtagaagattatgctttaggcacgctgacaagttcatatgagcttggatcaacggttaaaggtgcaacagtgttaacagggtttgaaacaaatgcaataactcctggaacacatttttatgatgcacctatgaagtttaaaggaactaaggaaaagaagtcttggaaaaattttggtgatatagacgatctaagagcgttacaagtttcttcaaacgtttatatgtttaatatcgcattaaaaattgctggtgtggattatgtgaaaaatagttcactagatattaaacaagaatattttgataaaatgagatattatttcaggcaatttggactaggcgtacaaactggtattgatttaccgaatgagactgcagggcaaattggaagaaaagataatcagcctggtttcttattagattattctattggacaatatgatacatatacaccacttcagcttgcacaatatatttcgactatcgcaaatggagggtatcgaatgaaaccacaaattgttcaagagattagagaacaaaccgttcaaaaagatgaggttggtaaagtagtacaatcaatagaacccgttgttttaaatagaatcgatatgaaacaagaacatattaatcaagtaaaagaaggatttagaaaagtatttcaagaaggagatggaacaggagtaagagcgttccaaaaagcaccatataaaccagctggtaaaacagggaccgcacaaactgtatatggtggagaaaatgaaattgggcgaaatgcgaaaggcgatcgtagagaatgttataacttaacattagctggatatgcgccatatgatgatccagaagtagcattttctgttgtagtaccgtgggttgaaaatgataaatcgggcattaactccgatattggaaaagaagttttagatgcttattttgatttgaaaaataagcgagtaactggtgaagcgccaaaaacagatgcctctaaagagaattaaaatgtacgaaacgtctctagcatgtctgtaaactagaggcgtttttatctgggaatagattagaaatgaggtgtatatgaagctgtttattctaaaatattggaggaacatatgtagttacatattaattataataggggttatttttattaataagtcctttttattttgtatggtagaagggatttcgatgcaacctactttgaatgaaaaagattatatacttgttaataaggtaaacgtctgtttatcgtcttttcatcatggagatgttgtcattataaaaaaagaagacgagcctacttactatgtgaaacgaattattggattatcgggggataatatacaactaaaaaaggatgaggtatttattaacggtaaaaagcgtgatgagtcgtatatacatttagatatgtcacaagtatccaatcgtttttcaaattttagagaaataaaagttcctacgcataaattatttgtgttaggtgataatcgtaatcatagtaaagatagtaggaatacacttggacttattgatgagtcaaatataataggtaaagtagaaatggtattttatccatttgatcatataaaatggataaaataattctattaactattcacgttttataaaatcaatcatatattaatagcataggacaagcagaaaagcttgttctaacctcacagaacactccttatcacggttaggcatctacataggtagatgcttttttttatgttgatgactgaaaattatttatcaatataatgtagcaagcatattaggactattaggggaagattacttgtacaaataacagtatgcttaattaaaacaatgaaatgtaaggagtgaggaataagtgctaaatattttagtggttaattttccagcagagggacatgtaaatcctacattaaatttagtaaaagcctttactgaacgaggagataatgtacattatattacaacggcaaactttaaggatagaattgaagatttaggagctactgtacatactcatccggatctattaaaagagatttctattgatgctgaaacctcatctgggttaaatgctttttttcatgtgcatgttcaaacttctttatatatattagaaattacgaaacaattatgtgaaagtataaattttgatttcgtaatttatgatatatttggcgcaggagagttagtaaaagagtatttacaagttccaagtgtagtgtcctcacctatatttttaattccgccagaatttttgaagacattaccttttcatccaaatgcagatatgccattccaaccagaggaaatctctgaaaaattactaaatcagatggaacataaatttggagtaaaaccaaagaataatcttcaatttatgaataataagggtgatgtttgtctcgtatacacaagtcgctatttccaacctaataacgaatcgttcggagaaaataacatttttattggaccgagtatttcaaagcgtaaaacaaatataaagtttccactggaatcacttaaagaaaagaaagttatttatatttcaatgggaacactgcttgaaggactcgaaccattctttaatacttgtattgatactttttcagattttgatgggatagttgtaatggcaattggtgatagaaatgatatttctaaaattaagaaagcaccagataattttataattgctccatacgtacctcaatcagaaatattaaatgaagcagatgtttttattacacatggtggtatgaatagcgtacacgatgccattcattataatgtcccatttgtaataataccgcatgataaagaccagccaatgatagcgcaaagattaactgagcttgaagcggcacatagactattgaaagaacatgttaatgtgcacactttaaaagaggccgtaacagatgttctttcaaatgaaaagtataaacatggtataagaaaacttaatgatagctttttaaaatgtggtggttcaaaagaagcaattgcagttattgaatctcttttaaataaagtaaaattttaatcagtagggattttactacccataaatagcgggataaatagtcgtaactgtatacaagcatagaggttctcacctttatgcttgtatattcttatccagcaaattgcacagcagtatttgcgtgtaaaaaagcagtatcaaaaacgggaacagtaagatcattttgggagataagtaaaggtatttcagtacagcctaataatataccttcagcgccgttttgaattaatgattttgtaatttgtaataacttttctttagatgtttctgaaatgatccctctacttaattcatctaatatgacatggtggataaaggttctttcctcttcatttgggataattgtctcaatgttatatttcgctaatcgtgatttatagaaatcttgctccatcgtttgttttgttcctaatagtccgatacgttttatactctgttctaccatttctttagcacttacatcaccaatgtgaagaagcgggatagatattgcttgttctacttcttcggcaaatagatgtacggtatttgaacacattaataaacattcagccccagatttttcaactttctttgcaactgtaactagttcatttttcacttcttcatattgatggttttgtaataaagtagttacttcaccaaagtccatactatataaaactaactttgcattttgatcgtattgagagagtgtaagtgtattaatatgtttatagtataatgatgtagattcccaacttaatcctccaatcaaaccaataactttcataatgcattcctcccgaaacgattttgaatttattatttcacaattccgataagaatacaatgatttaaatgatctatttaataaaaaataaaaatagtgagaaaagtattgaaatttatactttttagtgccataatacgaattacaaattaatacttatccagagaggtggagggaacggccctaagaaacctcagcaacccctatgcaattttataggaaggtgctaattccgcagaggacacgatgtgttttttgaaagataagaggattcttgaatgtgaaagaaaatgacctcttatgtaagaggtcatttttttgttgtatagaaagggagtgtcgatgcataattcatttttaaattaaatatagagtaataaaagttgactaatatgagaggggaattgtcatgaacaaattatcaacaaagttagtagtagcaatcggtattggagcagcattatacgggatattaggactttggggattttccattgcaccgaatacatttattaaaccagcattagctatattaactgtttttggagcattatttggtccagtggcaggactgttaatcggacttatcggtcataccgtaacagatacgattgctggctggggtatttggtggggctgggttattagttcaggtattattggtttttcaatggggcttattcaaaaaagagttggttttagtgtgaaaaacgggtcatttaacaagggggatatttcttatttagcaattactgggctagttggtattgtcattgctattatatttgctggggcattcgatattattgtgatgggagaaccatttgacaaaattgttatacaagtattaggagcaacaatttccgatgtcatcgttttcttagtacttggattgccacttacaattggtttggcgaaatccaataagaaacatacacatttaaaaattgaaaagtagggatgttaacatgcaaccaattatttcgtttgaacaattcacctttcaatatgggcatgctgtgcagcctactttaagtgatattacctttcatatataccctggggaaaaagtgctaattgctggacgaagtggctcaggaaagtcgacattagctcattgtataaatgggctaatcccattttcttacgaagggaatagtacaggtaacgttttaattgccggtaaagatccgagggaaggaagtatttttgaacaaagtaaacaggtaggaacaattttgcaagatcaagatgctcaatttattggtctgacagtagaggaagatgtagctttttatttagaaaatgaatgtgtaaagcaagatgacatgaaaaagattgtttcggactcattaagaaaggtgaagatgcatacgtttcataaacaaagtccatatgaattatcaggaggtcaaaagcaaacagtttctctagcgggtttattaacaacaaatgcggatatattattgttcgatgaaccgttagctaatttagatccactaagcgccttacatacgataaaacttatgaaagatatacatgaacaatataataaaacgattgttattatcgaacatagaatagaagaaattttaaacctggatttagacaaagttatattaattgatgaaggtaaagtcattgcgataggaacaccaaaagaaatcttagcgtcaaatatattaccacgtatcggcttaagagagcctatttacatcgaagcattaaagagattacattttgatagtaataatgacgtaatatatccaatggaaaaccttcaaaaagaaaaggtaagcaacgttataaaagagtggatggagaaacaagtcatattaaaagggaatactaaaaacaaggaattacttaaagtggagaatttatcattttcatactctaataaacaaaaagtattagaaaatgtaaacctttcaatatatgaaggagaaattgtggcactgttaggacataatggagcagggaaatcaacattagctcatagtcttataggcataaacaaaatgaaaaatgggaaaatcttgttaaaaggtgaagatattagttcttggtctattcgtaaacgtggggaaatcatatcttacgtgatgcaaaatccaaatcatatgattacacagcctactgtttttgaagaagtttcatttacattaacattacataatttttctaaggaagaaattaagaatagagtagaaggaactttaaaaatttgtggtttatatccatttcgtaattggccaattcaagcactaagctatgggcaaaaaaagagattaacaatcgcatctgtattaacaacaaatcctaaacttatcatattagatgaaccgacagcgggacaagattattatcactataaacaatttatgtcttttattaaaaacctagctaaaaagggaatttcatttgtttttatcactcacgatatgaatctcgcgctagaatatacagaccgtgcagtagttctacatgaagggaaaattattgcggataatacagtgtttgatgtattaggcgatcaagaaacgttacaaagagccaacttaagagagagttctttaaccaagcttgttaaatttagtgggattgcatgtccagaaaaatttatggagctttatttagacagtaataggagggaggaaggtgcatagtacatattttcatcgtatggatgggatagtgaaattgtttttatttattttttgtatgacgcttacttttttgttttttgattttcgggtgttgctaatattatttattattgggtgtatcgggctcagcattgctaaaattccatttcgtaaaattttaattgtttttagtgtcatatttacatttagtttattaaactctgtcatgattttattgattacaccaactcatggatctgaattaactgaatcatataccgcgtttttacatgttggatatgcaacgattacatatgaaacattattttatgcagctacactttcattaaagtattttacgttattaccatttacacttctttttatttacacgacagatccaagcgaatttgtaagtagcttaagtaaacttggtattcattataagattacttatgcaataaatattgcactacgttatattcctgacatccagtctgagtataaaattattaaacacgcgcaagaagcgagaggagtggcttttgaaaaaggagaagcaagtttatgggttcgtatgaagaaccgtgttttaattttctggccactaatcattcattctctagaaagaatagatacggtttcaaatgcaatggatttaagaggatttggaaagaaggataaacgtacatggttttatacaagtaaggcgaaacgtgaagatttcatcgctttatttgccggtattttcatatttattgttgcggtatatttaaaattaaacgtatttcaaaacttttggtatccattttaaagcactctttaaacgagtgcttttacttatttttatgtagacatgctcaaaaaagggatatatacataatgtataatacgaaccagttaaaatgatcaactacctattagttttcaaaccaaaaggaggagaaaatatgagttacggtggttcttgtggttttggtggaggttttgctttactagttgtgttattcattctattaataattgtaggatgcagctgctggggcggaggatactaatttttaattagtcttcacaaatgtaaactaaaaaaacattgaagatacttatgtatcgaaacaaataaaaaaggagcgactatgctccttttttatttgttttaatgcgtattcttattatatttcgggaacgtaatcgttaaagtcgttcctttactaacgatacttcgaatttttaaacttccatgcatcgtctcaataatcttaacagcaaccatcgtacctaaaccggttccttttgtttttgtactaaaatacggttcaccgaatcgatgtatttgctcctgtgacattccaactccgctatcttcaattcgtatttcaactttactattattgatagatgaggaaatatttaaggtaccaccattaggcattgcttcaatactgttctttattaagtttaaaaaacattgttgaaagtgctgtttattaccaacaatggttgcctcagaaaaatcctgtgtaatatgtatcgtattcatattacacaatggcaatatcatattaataacccgatttaactcttgttttattgaaatttgatctaatttttctggagcaggtttggcaaacgttaaataatcatcgataatttcttgggcacgatttaactcttcaagtatatgtttaatatattcgtctcttgactcaggagttaaatttggtgtttttaaaagctgtgtaaatccttttacaaccgttaagggattccttacttcgtgcgatatacttgcagcgagttggctaacaatctccattttttccattttaattaattttgagcgcattaatacagcatcttttataacttcatttatataaacaataaataacatcaaagtagtcggtaataccatgaaataaataatatacaaattattcacttcaaaatctgataaagttaatacaattaaagttgtaaatatggctaggaaaaaggttaaaaacatggaaaaagctactttaagttttctattatatgtattaaattttgaagatgcgagtgctgtaacgatgaacattattccgtaaacaacaacggtcagcatgttaaagccataaaataaaaatcttgtaattaataaaattgtaaacaatatgataccgacagggaatccaccataaagcgtacctattatgaccggaatttgtcttaaatcatgaatacaactttcatccatatagatagggtatcgcatacataaaataagcgggatactagaacaaagggtaatcagtagtattttatatttctttaaatagcgcccgctatcatatatgaaataaaaaacaaatatactacataaaatgtatagaagattatttaatacgttttgattaatataaacaaagtccataatatttgcctcgttattctgaatttacttaacatatgtattatacataataacatatgttaaggtgaataaaccttgttaatacaagatttgtttggctttttgttataaaatgcaaacatttttcaaacgttagctatccaaagatacttttactaaaattttttactccttcttcctgcatgttcggtaaaacatgagaataaatcctaagagttaatgaaatgtctgtatgacctaatctctcactgataattttaggattaactccttgtttcaatagtatagttgcgtgtggatgtcttaaattacgaattttaatttttttcactgctgcattttttatttccttataaaacttttccctgaaagcatttctgcataaccccccacctgatttattacaattaattaaatctaaatcttgataagcagaactgattggtaataagaaacgtttgcatgagattctaaataaatataaaaatactaaaggaaagtaaggtatgaaaaaacaggtgtttcaagaaaagtggacgagctaggtcgtgtagtaattccagtaagagtttatttgggaggtggcttttaaaactgatgttgttgagtacatgtggtagtaaaaggtagatggacatatgaaaaaagtagaaattgatgttagtagcaacaaacttttaatagtgcaggacgggaatgtgacagtagtcaatccaccaatgagcggatttggtgagcaagtcgcggtttagataaacggtaaggttgatcgtgtagatactaagtttactgaaaagataaaatgattatttttagaaagatacccagacggatttagtcgagaagctagtcaaaatcgcgtagatgtgaagtgaaaatcgtaaaaaaaaagagtcatgagtggaaaggctcatagctctttgaataagggtaatggttttataggtgaatattattattaaattctaaaaaattcaatgttagtaaattaattggtatgtgatttgagttttatagaaagagatcagctaacaacagctagctgatctgcaggttctgtaagacaaaacagaaaagaatattaacagaatatagaggtttattctggttgtttgaacgtagttaaagaaagaatatcacatactatcaattttaataaaaactatctgtggctttcacttctttattttattcacaaatagttccagtagctattccggttggagcgacacctactgggacattagtgataacagtattcgtagcaatatcaataacggaaacagtattactagcttgatttgtaacatatgctcgagtgccatcaggtatgatggctacttgatcaggggataaaccaacagaaattgtatcaatcacagtatttgtcgccacatttattaccgatacattattgctaactttatttacaacgtaaataaggtttccacccggtgtaatatctatgccaacaggttcggtacctacgttaattgtattaataactgcattggtagcggtgttaataacagaaaccgtattgctgttttgattcgtgacatacgcacgagtaccatctagtgtaaacacgattattctaggacgaatgccaacagggatggtatcaataactgtgttggtagcagtattaatgacagaaattgtgttgcttaattcgtttgcaacatatgcaagggcaccatttggggaaacagtaattccttgtggagcgatgccaacaggaatggtattaataactgtgtttgttgccgcattaatgacagaaacagtattattgccatgatttccaacataaacagttgtgttatttggagaaacagctacacctattgggttagttccaacaggaatggtagcgataacggcattagtagcagtatcaataacggaaacggtattagaaaaaatattagtaacataggcacgagctccatttggtgaaacggttacttcaagtggtgcattacctacagtaattgtatcaactactatatttgttccggtgttaattacagatactgtatcatttgtagggtcatctatgagtcctgcatttgtagcatatactaggaaattacatgcaggtccggttggcccggtaggtccggtaggtccagtcggtcccggtggacaatcacaatctccattaggtcctggtggtccttcaggtccttgaataccttgcacaccttgaggtccagtaggtcccggtggtccttccggcccttgaatacctgacacaccttgaggtccagtggttcccggtggtccttccggcccttgaatacctggcacaccctgaggtccagtggatccttccggcccttccggtccttgaattccttgtacaccttgaggtccagtgggtcccggtggtccgggaattcccattccggtccctgaaccagtaggtcccggtggtcccggaggcccttgaatcccttgtacgccttgaagtccttgaggtcccggtggtccttccggcccctgaatccctggcacgccttgagatccttccggtccttccggcccttccggtccctgaatcccttgcacaccttgaggtccttccggtccttctggtccttccggcccctgaattccttgcacaccttgagaaccctgagcgcctctaggtccaggaaatcctctaggtccagtggctccagtcggccccggtattccgatgttacttaatagcgaactatttaagattccttgtaaaattaagttgaatgtttgctgtaataaggggtccgatatatttgaacaacttataagtgaagacaagctttggaatagaaattggaataatgctgagatttgagtgagggatgcagtaggtaaggaattaattaattgatttatagttcttataactaaatttctatttggtgtatttggttgtactgttattaataaatcatttaatgcctgtaatgctgattggagtatttgtatagttgttggatttggtgttgtgaaaaaagaaaggatggcttgatttaattgatttattatttgtaataattcttgttgttgagaattcgagaaaaaaacaggtgtacagcaattactttgatcacaaggggatatagaaataaagcagggttgctgaaatttatcacacggatttttggaatttgattttcgattatatctcataaatacctccttttaaaaattgaatattaagtaatttttggtaaattattagcaactgactttgtaggtatatgtttaatgtgaaatgttttttccttcaaagtatatgccaataaaatagaggtgttcatatgggatatataaccaatacttggttgttaggaggatgttgtaatcataggaaagaaaatgaaggttacaaagtttataggcaagcgattgtattttaaaaaagcgttattgtaataaaatttgaagtttattaaaaagaaggaatgaaggaagatgtaaaagattttgaaagatccataaaaagaattcagtaaaacactgaattcttttacacgtatttttatttgttaatccatttagaaataataggaatttgttgtgcctattaaaatatgtactgttggtaattataacatgaaaatggattgtaatagaataatgcataaaaaagaacaagtaataaattaaacaaaagctttattttattatagataaataggtgactcagcaattgtgctagccgagtcacctagtactatggaaccaaataatgttctttttctatatgtagttatgtggagttcttagaggctagcccaatagacagttaagggataaataaaatcattttagagagttttacattttattatgttaatgctacaacagcaagagttaagcccaatgtatttaatgtattagaatatggtcctacattaacagtaagagtacttgttatacctaaaggtgtagtgaaaatagcgggtgctgatacagaagtgaatcctgcagtatatcccagagaagtaccagagccaatgattggattattattaagatacatagtgatacctgccgaattacctcctggttgaatgataacttgcacttcatagattgccaaataggttcttccaccttcaagtaaaacagttgttggtggtgtgaatgagattgccgtaccattagaatttaccacggtatctagtggaatcgcagaatttacagagactattgatggggtagtttgaacaacatttaaactgttagccgtgggggatggacaagtgcaaggtttgtgaatgttagggttattatcattttggtaattcacaaataatcaagctcctttgcgtaagataattttttatcctatataaaacgtagcttttttgtatctaagttatttttaaagagaagttgaatattgttggtcagttaacttttaaaagcatttgatactctgggatttaaaagtgcatctgataaatatatatgaatgttttttaaggacattactgtaagtttggaaacataataaaatcgttatttgaaactgttcatgaaaaaagagcaccatcgaaagtgctcttagaaaatacattttatattctgttttgagctacgattttaatattctctggtggaatgatatcttgaattttttcttttaaatctacttggaccatttcttcaagatgttcaagtgaaacttcaaagtttatacattccgcagatgcgatgcttaataaagaataattttcattctttttaacgacaagatattgcgattgatctgttattactatacacccttgttgaatgcctaatttacgatcgtcttcaaaagtcataaatgtttctccttttatatgtattgccgataaatagtttactacataaatacattggctcatattgagaaaccttacattagtattacaatttcatacggtttctgaatatcttatgggctagtaatacggagagtgtaagaaggttcaattgaatatttaacaaaatccttatttgaaaacaagaagccctagagttagggctctagggcttcttgttttggtattctcacatggtttttcaaaaagaatagaacatattgaagataacatgtgaatgtttcataaatgtatcaaacaagtgaacaaaattgttattgtagaagtagtagaaatgaagtttctattagttaagtgcgtaaaaggtattatttccagtagataaaatgcgcatggggcacctaatcattattataccagaggaaaagaatatgttatgaacttcggtgaatgaaaaaatgaatatttcactttaagcgaagttaatgaaaataaaaacttcattttagtaggtgaggaggatgaatgatggttgtagaagcaaaggtgaaatttgaattagatgaagaacaaaaattacagtttcaaaatataagagaaaatgaaggggaacaagaagcgttttactttctagaagaattgataatgaaagagattaatttagctgaatttttggagatggagtataaggataaagaatagcatttcagtcaaatcaaaagggggaacctgtgatggaagtagtggaaatcgaaggccagttatcaatatttgatataggttaaacaaaatttaaactgtacgaagtcttagaagcgaaatacctagaacatcataacaaatatagttgactatgtttgtcaaattttgttggattctttagaaaagtagtattgcagagagaaacacaatgatttggaaaagattattatacgggacttattaagagaatgtaggaattgataaagcttaacaaaatagttattttgcataaaaaaacaggagtgcgtgaccaaagcactccatgtcgctaatgacaacacctataaaagtatatgaatgattttcataaatatgttgttaaaacttgaaacaaaatagttagttatttgaatagaaagagattcaagaattataaggtgaaaagcgtcatgtattatccattgtaattaaatattcatagtatgaaagatggaagacaaaatatttaaaggatgaggtgaatataggatgttttttgattttttttataataaaacgcaaatgcgccctttaggaggatcggggcctgcacaaagtactattcaagcagttcatcaggctatacaagcacaacaacaagcgctgcaatcacagcacacgcaacaaagttataccccagcacaatcatattattctttacaaccttataccccagcacaatcatattattctttacaaccttataccccagcacaatcatattattctttacaaccttataccccagcacaatcatattattctttacaaccttataccccagcacaatcatattattctttacaaccttataccccagcacaatcatattattctttacaaccttattacccagcacaatcgtattacccaatgtagattatccagaatagaatattctttttattgatttcgtatgaaactatatatttttatagtaataaaaataataaagtggatttaaataaaaaagggtacacatataagtgtgcatttagattaacaggattgaacgtatggactggattgccctatacaatatgcttgtctaattagaaggtgaagtttttttataatatcaacggaaaatcaacaaaaacgctatagtagtaaataaataaaaaaggacctgctgtgggagaacaggtccgttacaaaaatgcctatgaggaaaatcaatgtcaccaatatagtatcaataaacgagaattcatttcaggtgctaagtattgagaaataaaaaatatttggcgcaacaaagtggtcaactttattagctaaccacctgttacacaaaagaaaattaggccctgcaagttaggatgtgtaacttaaagttacagttatagtgtaagccagatttgaaatgttatacgaaagttattttgataaaaacctcattttgtagaaataaggaaaataaaaaaagtactatgcataagtgctctttaagaaaggaggtaactctttaagcggaacgttcaggttagaaatatatgatgtgaaaaggaaatgagaacaaaatttcattttagatttaatacaaaagagcagctagcaaaagctaaccgctcttcagaaaaacattaagaaggaagttcagaactcaagtgtatttatagtatggacataatttgaaggtctattcagaaaaaaattataaagagcaaccactcaggttgctctacagataggagataactcagtgaacaaaatgaacacgttaaaaatgtatgtaacaaatagaaaaataagaacaaaaaagcagctagcaaaagctaactgccctggtgaataagaagaacacaatggtcattcgtattcaaccttggtgtacttatattgttaacactttttagaaatttattcaataaaagagcagctagcaagagctaactgctcgactctcgaccaagagagctagagtgggaagaatttaaagctgactttttaaagtcgtatatagtatcggtgaaatttagagatttattcgtgtaaagcataaaaagagcagctagtaaaagctagctgctaagccttcgggtatgaaggggaatcagaaactgtatatacattattaacggaatgttgtgttttattcagtagtagcctaatttgctactacttgatcttgatctgcaacatcagaatcaaatgtattcgttgcactaacaccattaaaattattaacgataaaagcggcattggaaccgcccgagccattataagattttgtatttgcttttggagaaacgttataaaaatcacctaagttgaaagaaccgttactggtttgtaagacaaggtttccaagaatagctggcatagctttcacctactttcttagggagtatttaaattagtatatggtgtatgtgtctagaggttcatttgaaacggagaattttgaaatgaagtttgattgaaaactcaataaaataatcacttgaatagaaagcgagttaaaagaatagaaaaagaacgcccaggaaagcgttccttgatcaagactcatatcgaaaaaacgaaaatgtgacagcgatatatattatttaagttttgagtgtatgtgcaagtttaaaacaaaatccttatttgaacagaaaaaaagaccgcatgggaaagcgctctttgaccaagatatattaaaaagtatcggcaattaaattttatgtatattttcagtttatgtgcaagtctgaataaaatctttattttatcaatttataggttgatacagttccccaaacgaaaagaaccaagtaaaaaagtctttgtagtagacctgcaggtaaggggaaaagaaaaacaagtgagataaggatagttattactattaagcttagtaaacagaaatatgtccattttctagtttttttaagattcttagcaaaaataaatagtcctggaaataccgtaagcatgcctatccaaactagaatggaatgtccaattaggtttacatctgcaggaattaatcctgaaactatagtagagattcctattataagtataaaaaatgttgctattctattaattcttgttttttctagatgttgtgaaatatatagtactccaatacaaaatgttattccattaacaataaagagtatattcatcccaaaatgattaggggagcatatttcatacggagctatttcgtaggtgaattctccgcaggttgttacacctagatcactcattgcatgatgcaaatagttataaggtgctgtagaagtgaaaataaagaaaggttcaattaaaaagtatagacaagttgcaatccagctaaataagccaattttatttgatatatacattagatacctcctttgaaaaaagtatatttccattataggtggttacatcatcaaaagtaaaaattttcaagttgaaagtcgataactctgttcaataacataggattttctagaaaaatgtgattagcggaaagacgtataaaaaatggatggggcagaacctaacaaaatagttatttgaattagttttattaataaaaagagcacacttgtatatgtgctctcaataaggtagatgaatgtctcatgaaacagaaaaatcccaaaagttgtaatcagattttcatgagtaaatttttaatattgtattccttatgtgaatttatggagcctgtcattaaagaaacgatacgagttggagttttaacccaaacgatatttcataataagcgaaaaggagcacacatataagcatgctctttaataagaaaggtagatctctatgagcgcagagactacatacaatatccatatgtttgtttcttttaaatgtgaagaaaaaatcaacaaaaggtcaatgtaaactcaataaaaattcaacaaaaacgctattttattagactgcgagatggtgatatgagtcttacttttatagagatatttgtaggtcgtgagagtagtaccttcacgacctacaatatccctaattcctttaatggcgtttctagttattttaataaaatttcatgttctggttctaaatggattagtatgtgagcacgattaaattgtttcttaatatttttctctatccgatcacataattcatgggcagtttcaatgttatagtgagatgaaacgacaagatgaaaatctatgtattcagttggaccagaacgtcttgaacgaaaatcatgaaactcaatatattcatctctataagattctataatttttatgattttttgttcctctactggtaataaacgtgcatcaattaatgggggaaaggacttcttcattaattcgaaggcttcagtcatgatataaacagctaaaataattccaatgattgggtctaggaaataccattctgttatactaactaaaagtaagctgattgcaacacctaaagaagtgtatacatcagtgagtaaatgtagtgcattagatttcattgcaatagaatttgttttttcagcagttctgttaacaattcgtgatactacaaaattgatgagtgctccaatcaacataacaactattcctaaaaatgggagatgaatgggttcggggtgtatcaatttaagggtacattcataaataatccaaaaaccagctataaaaattaataatgtttcgattgttccagaaatattttctacttttccatgtccatagggatgtaatttatccgccggtttatttgaaattcggacagaaaagaaagcgatgattgaagctaataaatctaaagaggaatgaattgcttcggaaagaatagctactgaaccagtaaaaataccaataacaacttttaaaatgacgataaaagtgttacttaatactgacgaaaaagctacttttgatgaattcattgttacatatcccccctaccttttattaattattttttatgttatcagttcaatatacagtgggtctatagcaatctttttgcaaaagacaataaaaattgaaaaggtttcaatatgtttcccgtgggcatatttaattgttaaccaaaaaattgaaatataagttaataaaatgaattaaagacagggaataagaggtgcctagtgcttttgataagttatcttcggtgcaaaactaaaagcagctagcaaaagctagctgctaagccttcgggtatgaagggaaatcagaaactgtatatacattattaacggtatattgggttttattcaggtgtagagggaaataaataaatttaggctgttccaacttggctttggtcggcaacatcagaatcaaatgtgtttgttgcactaacaccgttaaatgtattaagaacaaaagcgacattagatgaacccgaaccattataagcttttgtattttcttttggagaaacgttataaaaatcacctaagttgaaagaaccgttactattttgtacaaccatatttccgacaatagatggcatagctttcaccttctttcttagggagtatttatattagtatatggtgtatgtgtctagaggttcatttaagtttgaaaattcaaagatatagcttgtgaaaaacttaataaaataatccttttgtttatagaaaaacaagctaccacgtttcattgattgtgaatcttttctaaggtgtgcttaaggggatgggaataaaaagaatattttcgagaggaaagggattaatttatgttaggaaattagtttgataaattaaaagaacctaaatgtatacatagatataaacttaataaaagttatgacaatgaagattttagaactggtaagatggggatagttagttattataaatgtgaaaagtgtgggaaagagaaggaaatcagcaaatatactaatgatgttaatagtgactattgggatgtttaaaataacattcgaatatagtccggctagaaaactagagaacaccaattcattaaagtagcaattaaagctgttttaggaataggtgtcctttttatttcgttttaaaattagaacacaataatatgaaatgctcataaaatcattcttgctatacatgataatagtataaactctatatttcttttaataatttagggttatatcttttctgcatcagccgcttttaaccacgcttcgtagaattctgtaactgatgcataccgttctgcccgattgtcatttacagcacgatacgctacctcatataattccttacttgcttcccattttataaaagaacgatctttttcaccgcctaagagtgagaaagccattgctcccatattaaatacatttgttctttcatcaattatagcgtttagttcaaattcctctggtgacataaaacgggaggaaccccatagccggcccattttatttatgtaaggtttcttactgtataaatctatatcacaaatttttgtttcgtttgtattaaaattatataaaatactaccgtcataaaaatctatcgctacataatttttcttttctacataagtatggaaagaaaaaatggaatgtaaagaatgaattcgttctataacaggtaaatgtctaaatttataaaatggagagtttggatttttatatttctcaggaggtgggaagcgccaatgcgaatgaagacattcaccatcaaaccaatcgaaaattaatacatatccagattgaactggaaaatgatcaattaatcttatgagcgattcatgctttaaatcttcataaatagtaactgaattttttagcctttcaatagcatcacccgttgttccttcatatgcaattgtttgtgctcctgcgtatttgataaatttcttatgcccatttttttctacaccaaaacttatattacctgaatcttgctggtcaaaaactgcaaatacggtacctaatttaataagccaatcaaaattatgatgttcttttaattggaatattacactatttaactgaacttcgacggaattatctttcatagattacctcacatttaatataattaagttgtacattccactattcgacatattttgtggaaatcctatgctaacaacataaaattttataaatataatgataaacacttatagagaggtgagtacaatggaccaacaaattgttattaaaccgtatcaaaaagactgggttgaagagtatataaaagaagaagagaagttctgttccttgttaggacaagaaataatcgctgttgaacatatagggagcacagcagtagaaggattaggagctaaacctcttattgatatgatgattggcgtaacagacttacaaattactgaaaactggattgagattctatcggaaattggatatgagtatgttccaaaagatgcaaccaattggcgtttttttagaaagggaaaatggagagcaggtactcatcatttgcatgtttatatttataatagtgacgagtggagaaacaatattttatttcgcgactttctaataagccataaatgggcacgtaaagaatatagagaattaaaagagaggcttgctattacatatgcttttgatcgtgtttcatatacaaaggcaaaagcgccgtttattcaaaacataataaagttagctgaaaaaaatcaataatagttgtcagtgatattgaaattctcattttattttaatctttctctcattttattttcttttttatttgatagactgcttgttacaaagcctttattagtaaggagattaaataaaatggagaagatattaagaaataaatatttccatgtgtgtgttaaaattataggtattactattattatttgtagtgtagagatgctatttattaatgttatgtacggcaatgttctgaatgtaaaatggttaaataaaaaattaggctcttttggtgaatatggggctattatcgctgcttcattatggtttttacgccatatatggatgtttttaaagaagaaaaatatacaagggtttaaaaaagttaaagaagtgtatctatttgcaaaaaagtttcatgtattaattggatacgctataatagctgttgcaattactcatggtgtttacttttttataaaagggagtcgtcatattttactcatatacagtggtatattttctctattagccttaattgtactaggggtttttgggttttctttacagcaagtaaataaaaaagaaaaatttatgatgtatagaaaagtgcatcaaatcattgtaattatatttggaataggattatttattcatttaattgtctaggaggaactatcgttgcaacacattttaattattgaggatgaggaaagtttagcagattttctagaattagaactaaaatatgaagggtataaagtagatatacaactagatggaagaaaagggttaagcgaagcacttgaaaagaattacgatctcattttgcttgatttaatgctgcctggattaaatggactagaggtatgtcgtcgactaagagcgactaaaaatacacccattattatgctgactgctcgtgatagtattatggaccgtgtgacaggtttagatagtggagcggatgattatcttccgaaaccatttgcaattgaagaactgttagcacgtatgagagtgatatttagaagagaagaacatattgaaaacaagcaggtttcatttcttacattcaaagatttgcagcttcagattgaatctcgaactataactaaaggagatgaagaaattgaacttacaaataaagaattcgagttattgcttatgtttatgaaaaatattaatcgcgtacttactcgtgatgttttactggatcaagtatggggatatgatgcaattgttgagacaaatattgttgatgtatatgttcgttatttgcgaaataagttacatagtgtagataaggaggagtatatccaaacagtgcgtggtgcgggatatataatgaaatgataaaaaatattatgtttcgaattcgaaatctacctataaagtggaaactaacactttggtccactacactagtatttattttattcatcttatatagtgctttgcagtttattgtaattaataagtggactatagattatgaacagaaacaaataaataggcaagttacggaaatagcggcatatttccaagataaaaatgataccctttcgagtaaaacatttaaaaacagtaaagattttctaaacaatatgattgataagcatcaaatgattcgtattattgacatggatggggagccgattattactgtttcacgagattttaatgaaacgtggataaagccgaaacaggttataaaagatgagtcatttataaaaaggcatttagaagatcgaatattagttaagcgcataccaattaaaacgaaagagtttactggaactattgaacttacgaaaaacctagagacatttgattatttattaaaagttattttagtggtaatgcttattgctggaatatttggattgatatttagttttttaggtgggattcttataactaagaaactattatcaagtgttcaaaatataacagatacgatgaaacgtattaaaaagaatggactaaatgaacgggttccagtacgagaaaataatgatgagcttgcaaaattatcatttctctttaacgagatgatggatgaagtagaaacttcttttacacaacagaaacagtttgtcgaagacgcatctcatgaactaagaacaccgttaacaattattcatggtcacttagcgatgttaaaccgatgggggaaaaatgatccagcagtattagataaatctcttcaatctagtttaaaggaagtagttcgtttaaataaattagtttcagaattgctagaactatcaagagctgaatctgaacaattgcatccaatagcagctgagccagttcatgtaaatagcgtattaaaacatgttacacaaaactttgtagtactccaaagtaattttcaatttgatatgaaattcggggatgacgaggcttatgtgtcaatgccatcatcttacttagaacaaattattattatcataatggataatgcagttaagtatacaaaagaggttaataaatatatttgcatagaatccagtttacactcagggaaagttacaattcgtgtaatagatcatggagcgggaatacctgaatccgatttaccatttgttcttaatcggttttaccgagttgacaaagcgagaagtcgaaaacaaggtggaaacggactaggtttgtctattgcaaaacgacttgtagaaaaatataacggagctattaaaatagagagtaaagaaaatgaaggaacaatcgttacgattacattaccatgtataataaaataagccttcaaagaaggggtgcttcttgcattccttctttttttacgatcaaatcattttgtttatttcgaaatttctagtacattaaaattattaagggggaataataatgaaagctatcgtacatcaatataaaactggatttgacggtgtagaatataaaatatcacctgagagagcacttaatgatggggaagttaaagtgaagttaaaatcagcaggcttaaatcatcgggatttatttattatgaataatagaaaagaaatgcaattgcctttaatcttaggatcagatggtgcaggtattgttacggaaattggaaacggtgtttctgataacatattacatacagaagttattattaatcctagtattggatgggaacatgctactgaagtaccggagttaccggaagtgctaggtggaccgaaagatggaacgtttgctgaatatgtaattgtaccagctgaaaatgtagtagaaaggccgtcatatcttacttgggaagaatcaggtgttttatctttatccgcattaactgcatatagagcgctttttacaaaagggagattgaagtgcggcgaacacgttttaattccgggaataggcggtggtgttgctacatttgccatgttattcgcgaaagcaattggcgcaaaagtgagtgttacttcaagggtagagaataaaagggaacttgctgcaaaatatggtgcagatatttcttttcatagtgccggaaattgggaagagggcttacaaggtgaaaaagtagatttaataatagatagtataggtccagcaacttttttgaaatattttgatgtattaaaaccaaacggaagaatcgtgaattttggtgcaagctcaggagataaaattgaattaccattacgcgcgctattttacaatcaaattgatattatgggaacatccatgggtagccgtgaggaatttaatgagatgataaagtttatagaaaaatatcaaattaaaccaattattgacaaagtttactcgttagaagaagcaattcgagcactaagccgtatggaacatggagaacaatttggaaatattgtacttcaaatgaattaaaaaatatgattttgcaattagtatatttaaatgaatatgttatgtattccaaacatgaaaaaaaaacgaatcgccttattataaaggtttacgaactttatacataaatagcgtataaaatttgttttataattgtcacatgagtaatagtaaaatgagaattagatgagaaaagtttaagcccattttcataatggtattgtatactgtgtaaatcaagaacacttgtaagtagggagagagtattatgaattacacagtatttcagtggtttaataattttgctgattcatccaaactattagatacgataatggttgcaattacaaatagcgctgcatacgtagccattttatttatgcttatcttatggtttaataatggaaagaaagagaatgcaattagaaaacaatatacagttttatatacgacgctttcggttattattgcattagtagtaaatgttcttatacatgcggtatattaccatccgcgtccgttcgtatcacatgatgtacatcaattagtaccacatgcagcagattcatcatttgttagtgatcattctgtacttgtattttcaatcgccttcgtatttattcttagaggagaaaaactgaaatatatcgcgctattatgggctgtgttagtcggtatatcacgtatgtacgtaggtgttcattatcctttagatatacttggtgcagcattcttaacacttgttacgagcggtttagtaatgcaaagtacacgtatgtttgaaccaatagcgaaatttgtattcaaaatgtatgcattagtagcgagacgaattcctttcttagcaaaatataaccatatcgcataattttcttataaaaagttcccatttggaaatccagatgggaactttttatagtaaataagaaaagagtttagagtgctatgcaatcaagttttggtgaagttaatattcagaaatttcacgcaccgtattttaattaaataaaacaaaaaataacaatagttagttttgcattgttttaaaggaattaaaaagaaaacttcgaaacatatagtatcgtaaacaaaaactacaaattttaaaacgtatcttcgtacgaatccattccaaaagagaggagataagtatgcaaaaacttcaaacgaataaaggcgctcgatatatgatgattgcttttattgttttgtttcttattatgattttgcgtatattctatattcaggcagtaggagtcgtgcataatgtaaatgtaaaggacctcgcggatgaacaacataataaaaaaggtgttttagaagcgaatcgtggtactatctatgaccaaacgggaaaggtgttagtacaagattctacaacgtatcgagttgttgtgaatttaaaaggaaaagataaagtgaaaaataaagatgaaaccgcacaacaattagccgatgtacttgaaattgataaagaagaagtattaaaaaactttcatgaggggcgtacgcaagttgaaattggaaaaattggtcggaacttatctagggaaacgaaggaaaaaattaatgatttaaaaataccaggtgtatcttttatgtcggaaaaagcaagagtgtatccgaatgaagattttgcatcctatatactgggttttgctagaccagatgataaagggaatacggaaggaaagtttgggcttgaaaagagtttggataaatatttgcgctctacaaacgggaatatagaatatgtgggaacacgaagagggattccacttacgaatgatataggaaaagtagaacctgctaaaaatgggaataacgtatatttaacgcttgataaacaaattaatagctttttagaagaagcgatgaacaaagcacaagagcattatgatccttctatgttaattggcattattgctgatccaaaaacaggaaaggttttagcgatgtctagtaaaccgagttacaatcctaatgtaggtgatatcgaatactttttaaatgatccgattgcaaatgcatatgaaccaggttcaacaatgaaagtttttacgttagcagctgccattaatgaaggtgtatataacggaaaagagtattttcaatctgggaaatattccgttggttcatctgatataaaagaccataatggtggatttggatggggatctattacatttgatgaaggttttgaaaggtcatcaaacgtagctttttctattttagaagatcagttactgaagccaaataaatttaagcaatatatgaataaatttggattcaatcaaaaaacaggaatagatttacctggtgaaagtaaaaatactttattattaaatacgcaaattcaacaggttacaacttctttcggccaaggttctacagtaactccgattcaattaatccaagcggctactgctatagcaaatgacgggaaaatgatgcaaccatatattgttgataaagttgtaaatccaacaaacaaagaagttattatggaaaatcaaccgaaagaaattgggaatccgataaaaaaagaaacggcggacaaagttagaagcttaatggagcgtgtcataacatcttcaaaaggaactggtacaatgtataaagtggatggttatccaattggaggtaaaacaggaacagcacaaatcccgaatcctgaaaacggccgatatatggaagggaaagagaattacattttctcctttttaggaatggctccaattgatgatccggagttaatcgtatacttagctattaagcagccaaagttaaaaggagatgagtatggagctcagcctcttgctgaaatatttaaacctgttataaaaaacagccttgaatatttaaaggtgaaaccgtatacagaaaaacaaatagctgatgcaacgaagcaatctcaattaaaagtacaaaattatgtaaatcaatcgatgggtacagcagagaaaagtgtagaaaaagagaagatacagccaataattttaggagaaggaaaaacaataaaacaatatccacagtctggcgaggtaatgagtgaaggggatcgtatatttttattagggaataacgcacaaatgccaaatttaaaaggttggtccatgcgtgatgttatgtatttctctaagcttttgaaattagatttgaaaacatctggtacgggttatgtaacgagccaaagtattgaaaaaggacaaagtttacaagaaggagatacactagaactagaattagaaccgccgttacaaccgttaacagaggcgaatacgaattaattcaggtatttggaaggagctagatgcaaatggctctttctttagagctgtaagtaatttcacgcaccgtaatttttagaaaaaacaataaataaatgaattaacagagacacatcattaaatgtctgattattttttatttacagttaaaaacaattgtgataatatggaaaaaattaaatgcagtgaagagaagagtaaataaaatgaatttttcacagagagctccatttagctgaaaaggagtaaaaattctttattgaaccaagcctctgagcagcgcatcggaacctattattagaggatggtgtgacgggagctcccgttatagagctatggtataagcatgagttagaatgcagtacctgataaggttaatatggtgacatattaacaaactagggtggcaccgcgatgataaatctcgtccctaagattaaaagtcttgggggtgggatttttttattgttttaaaacaatttggaaagcgggggccaaaaatgaaaaactttcttaaagattggaaatatcctttactattactgtccggtgttggtattgcgaatttaggggcatggatttacttaatagcattgaatgtacttgtctatcatatgggcggctcagccttagctgttgctactttatatgtaataaaacccttagccactttatttacaaacgcttggtctgggagtatgattgatcgtttaaataaacggaagttaatgattcacctcgatatatatcgggcgttatttatcgctattttacctttacttccgtcactttggattgtttatgtattcgtattctttataagtatggccagtgcaatttatgagccaactgctatgacgtatatgacgaaattaattccagtagaacaaagacaacgtttcaactcattacgtagtttaataggatctggtgcatctttaattggtccggcgatagcaggggttttattaattgcgagtacaccagattttgctatatatataaatgctatagcatttcttttatcaggattcattacattacttttaccgaatcttgataagaaaaaagattcggatacaactagtaatacattatcccttacagtattaaaaaaagattggatcactgttataaattttagtagaaaacatgtgtatgtcgtatgcgtgtacttcttatttcaaagtatgttcgtattagcaaccgctactgattcacttgaactatcgtttgcaaaagaggtattactactaacagatagtgaatatggttttctagttagtatagctggtgcaggatttattttaggtgccataacaaatacaattttgtcaaagaaattagcaccttcacttctaattggaataggatcattattcattgcaattggttatttaatttatgctttttcaaatgtatttttaatagctgctattggattctttattttatctttttcaatggcatatgcaaatacaggattttatacattttaccaaaataatatccctgttcatatgatgggacggattgggagtatatatggacttgttattgcgatagtaacaatctttattacaatattatctggtgttgcgactcagttcatttctatacaacttgtagttattgtaggttcattgattatgttatttattactatcgtcttgtgtgtgtttactttattcccatcacaatctaagttgtattctactgaatcaataaagtgaaactttaatcagggggcatccccccactgattatcagccctcaccaatcgagcttttacgggcagcagggtccccacttaacttctttgctttcgctgaattttgagatgggggtcttactgtccacaaatagcgggataaattcgaaatgaactttgtgttctcattaacaatttatcgtatttaataaaagggttctttcccctttatatggaaaaatcaataaggggaaagaacaataccgaaagataagggtggttgtcgtgataaaaacaaaagatgaaattgataaaattgtaaaagaaatacaaaagaaaatagatttctctggagtagttttagtaaaaaaagaaaaagacttagtctatgaaaaagctttgggttacgcaaaccaaagtgaatgtataaacaatacgatacaaacaagatttggcattgcctcaggatgtaaaattttcactgcaattggcatctgtcaacttgttgaaaaaggttttatttcttttcatacaaaattaaaagattgtctagagataaaattttcaaacttcgatgaagatattacaatacatcaactactaacgcatagcgctggtataccagattattttgatgaaagtattatggataacttcgaagatctttggaaacaaacacctatgtatctattaaagagtttaaaagactttttaccattattccaaaaaagtaatatgatgtttgcacctggaactaagtttcactacaacaatgcaggttttatcatacttggattaataatagaagaacagacgggacttaaatttacggagtatatagaaaagaacatttttaatccgattggcatgaatgattctggctatttttcgttagatagattaccaagacatacagctctaggatatataaaggacgaaaccaaccaaaattggagaacaaacgcctactctataccgataaaaggaggagctgatggaggtgcatatgttactgcaccagacatgctgaaattttgggcggccctatttaataatgaaattttaggaaaggaatatacaaaattacttttaactcctcacattcaagtaaatgataaacagtcctacggctatggaatatggattgaaacacgagaaaacaaggtattcaaatatcatgtaatgggatatgatccaggcgtcagttttcgctcggctatatatccagaattaggaataactttagttattacgtcgaataaaggggcaggacctgaaaaattaatgatagaaatagaaagagctttttaattatatggatttaaaagaagagatacgaaaataatttaaacgggttcatgattgtttctgttttgaaaaatattttagttaacgaggaaccctttatttattaaataaggtttttttgtaattctgtacaattatatataattatatggatttttaaattagaaaacattactatatagttgtaaatttttattattaattcatatgaaaggatgtgttaacaatttgtatatgattaacggtagtgtgtttattattttaggagttatttgttatttaattgtacgtggaatattaattagtaccaaaaatacaaaacatgtaatttggtggaaagaaataataagttttttatttgtgatctacatttgtatggttgttgcagtaactttattccctttaccaatcggttttccttttaatattgaaaatctgaatcgctcggtcaatataataccatttgcatcaattattaaagacatcaatcaaattggtagtgcttatgatggagataccctatttatgattggtctaattgtaagaaatgtaggcgggaatattttattattaatgcctttaggatttttagcaccaatcctatgggataaatataagaaattcaaaaatacaattttattaggattttctatatcagctagtattgaattgctacaattaattgagtctttatttagtggagtgggacgtattactgatattgatgatgtgatctgtaatgttataggttctattgttggatattgtatttatattatctttttaaaagctattaataaatttaacattcgagtgttgggtaaagctaattctaaaggtgtggaattagttgataaataggagtttaaacgagttattaaaggcgtacgagtaaaaagtacgtctttttatttttataaataatgcttaaggctgatgagaaatcacatttttcatcttacacttgaaagtagctatggtatttcaagtatggaatgaaaagaggagaatataatctttaaagataaacaagtttataggaggattctaaatggatattttacttgttattcttattattgttttgatgcaaagtaaagaacgaaaagtgaaaataaaccgtatttggctcattccggctttgttgtgttttgtaacagttcaatccattattcatatgggacaaataactttgctgcaaggactactgtttgttgtaatgcttggaattggcttatgtcttgggattatacggggaagagctttaacatttcgattagatagtgaaacaggtcatgtactacgaaaaggaaattgggtaagtacaataatccttcttgttattttaggagcaaaaattatgattaaacaaagtatgttttcgggtagtacgcaccagacattaatggttgtaacaaatgcctttttatgtattacattaggcactgtgattagtagacgttattatatttggaaaaaatataatgaattaacacaaaaagcgtaaatacattcatcccttgtttaacattgctaagaacggtaatactaattaacattgaacttttacaacaagggatgataatatgatatacatttacacagattttggtggaacacatactacctcactagctgcagcgtatcatttaaataaattaccaacggatcgcaagttaacgaaagaagaaattttgaatgtagattactttaataaattgaaaacagaagatatgggaaaaattatttttcatggcatagatgaacatggtcatcctgtatatacgattggatgcggcgcatcaaaagttgttgtaccagcgatgaagcatttaggagaaatcttgcaaaaacattatcaaagtcatgaaaagattattttttctaatacatcaccaaccgtacctttaccaatgactttcggtgggctgttttctagaaggttccatatcgattttattggcgtaccgttactcgtatggggagcaaaaatttgctgtgataatatacaaaggcttgttagttatacaaaagaagctggccgattaacgaatgattatgttgtaattttagataatgaaacttttaaatagtatatgataacaagaaaatcgagcaaattccttgattttcttttttatttgtgaaatagacaagaaatagtcacatttaatatacatctactatagccaaaacaataaagtcctgttactattacagggatattctcttttcataacataaatatatagaaaaattagaaaagaggaattgaattaagggaggaacaacatgaagcgtgttgcttggattactgatagtacaactgcgaattttaaaacagaaggagataactttgttatcccaatcgaagttattattgatggaatttcgtacaaagattgtgaagaaggtgtacgtgaaagggtttataatgcgttaaacgaaggtaaaacagtcactacttcacaacctaatattggggaaatggtagagttatttacgaaatgcaaagaagaatatgaagaaggatttgcagttgctattagcggaaaagtaagtggaacctatcaaaatatgaagttagctgcagaaatggcaggttttccattaacggtattagacagtgaaacaacaagttatccaatggatgaactaattagaaaagcgaaatcgttatacaatgatggtatgactttacaagatatacacaaaacattagtagatgaaaaaagaagaccttttcatgtattcccaaagagtttaaaaggtctatatgcaagtggccgtgtaaagggcatgcaatttttacttggaagtttattaagtgttaacttaatattagaagtaaaaggtggagagcttttacttgaaaagaaagttcgtaaaatccaaaaatgtcgagaatatattaaaaatgaacttgaaaaagaattaccaaaagtacttcacatgttccatgctaacgataaagctggagctgaagaatggattgcagatattagacaagcattccctgaaatggatttcaaattatatccattaccaatttcatttgcagttcatgcaggtgaaggtacaatagcaatcagttattaaagtaaaacccgtgaatgattcacgggttttttcagagtgtcgggaaagaccttatatactataaggtcttttgtacctcttaaaatggcttgaatagcgtttatttgaggtcattaggtagttagagattgatgactatctttaacgaaaaaagttgaagtcatatttttcaatgttaataaatcagaatattctttctattatttctgcagttacaatctatttacatataagattattaggattatattgacaatgaaagagaaaacaatagatggaaggggatgtttttatgttaaaaaaagcagcactagggatttcatcgttagcaatcacagcgttcgtcggattagggatggcaacagaagcttcagctggaccagcagcaccacttacttcactaaacgtcgtacaagtagagtctgagctaggcggggtagaaacaattaatcagaacagcttcagcacatcgcgtaaccacgggggaaaatatttatatattacaacgaaagaaatgggctatggccaaaacccatttgctaaaatgaatggttctaatgtaaaaagtattgattccactataattggcggaagaccaatcgttggctggtattataaatgggatgcttctggacaccaacaaggaacttttgagtaccaaaagacatctataaatgcaccatttaatacaatgcgtacatcgatttatatccaataattttgaaagcgttcgcacatatagaatagtaaaaaaggtacttctaggagtacctttttttgatttgaatcacgttcatctatatttacaatcctaatttcacagcaagaatacttcccataaaacaaaatccttaaacgtctataaaattaatatgaacgcgtagtacaagtccgctacagttaaagtacgtaattttacatatttcaactcaatgaaaaaggaagaaactgcagtacttacgccgcagttttaaattcatccatgaactcacagttttttagatatataaacataaacgtactacttgctactcttttttaaattcaagattacaaaaggagtagttaaacttatataagcttagcttaatggggatgtggcggaactttaaaattaattacatctttttcatagcataaataattttgtatagggagatgaaaggatttttttaaataataaagaagtatgtataaacaaatatataaatggtagtgattaggatgaaaatcagtaagtttgcagaagtaaataatgtaagtgtagatacgattagacattatatggacctcggactcgttatttccgagaaaaaaggaagtcactatttttttgacgagtattgtcaaaaggatatagaacttatattagagtacaaatggctagggtttagcttgtatgaaattaaagaactgtttctttataaaaatttagggaaatccttaggctatgaaaaggataatttttatcaatctttatttaaagtaaaatatgaaaagattgaacaagaaataaaaactttagaggaacgaaaatgcaaattaaaggaagcgttacataatttatctatagaaactgaaatttcgagttcaattttaggggtagatttaaaagtacttcatttatttaaatgtgttaagtgtaacggaaatttaattcttgaagatggcattattaataagaatcaaattattgagggaaagttaatttgtaattgtggtgaagaatacacgattatttcaggggttttaacagctggtaactcagtgaaagcgtatgaaaagaaatcacttgaagattctatttcggattatattcatgaaactgatactgcttttttggaaaatgttcaaagaggaggagaatgggcgaaaaagaaactaatgcaattagatttaaatgaaaaaatactacttgatttagggtctggtattgggttctttttacgaaatatttatgaagaactaccggaagagtgtttatatattgctgttgatcgagatttgaataaacttttacttttaaaagatgtaattgagagaagaaatgtgaaaagaaatattgtatttatctgtgccgattttctaaacatacctattcagaattattctattgatattgtaattgatcaatcaggtacaagtaattatagttttgaacatgaggagttcttattgtgcgaattaaattctctttttaaacacaatagttatttattaagttcgtttattttatttaataaatttagtataaatagccaaattgcacctagactcagagagaattttacatctgtaaaagtaacgaaagaaatccaaaatctacagtttcaatcgattgatgaaagtacttcaaattatttgatacgagggggaaagtacgaggatttctttgttcaaggagaagaaatttatacatattcatttttcggaaaaagatggggttaatcccgtcataaaaagtccgtttttataacgggactatttatgacgattcctatctatactttttacgatgaaaagaaaaagagaatgttaatctaaatgtttagcactcactggacagtctcttgtcggtgtatgtctagtaagagaaaagatagccaaacctaaagataataaaactaaagatccaccaacccaggccatattggcgacattatgtacttgttttaaagctatacctccaactgcagagccgagtgaaattcctatttgtagggctgaattattaaaactttgctgtatatctgacgtatccggggcagtttggattaaataactttgttgaggtggtgcaagcccccaactcaatgcagcccaaactatcataacaggaataaataggataatagaaactgcagtaaacggtaatataaataagattagagcaaatagagtaataactatcaaaatacttttttgagcgcctattttatctgataatacaccgccaaacgcaccgccacttactgcagctataccaaacactaaataaaatatgctaatccaataagggcttaggtgaaacttattttctaaaaaaggagtaaaataagcatatagagtatagtgtcctgctaacataaacatggtagctagatgggcagatcctagtttaagactacaaacggcctttaattggatagataaaggagttcggttttcctctccaggtattttatctaaaaatactgaaattaagataatagaccccaatgataaaatagctatacataaaaaaataattctccagccaaatgtgtttgaaattaatatgcctagtggtactcctagtacaagtgaagagctaatacccatataaattaatcctaatgcttttgctcgataagcgggattaacaattttagctgcaattgttagggaaagtactacaactaaagcagtactcatagcagttaaaattcttgctatcatcataaaagtaaagttcggactaaaataagtaagtagattaccaattagaaaaatgtaaagtgaaataatatataatttttttctttccactttacttgtgaaaatcaataatacaggacctgctattgcataagtaaaggcgaaaattgtaattaattgaccagcagaacttaatgaaacattaaaatctttagcgatgtctggcaatattcctccaacgataagctatacaagacctaccgctatcgttgctaaagctaatataaatactttgaaattcattttttatattcccttctctgcattatttaccgtagaacaaaaaaactcctgactacaaacgctaaaagacgcattttgtagtcaggagttgttggttcctggtagagacccccaagccatattcttggagttatacatgattctcatatgtaattaatcaacgtaatagaagataccatattattttttagatttcaataaaaaatttgcatttgtacatgtgatcttattaatcattttattttttatcgttgtaggaggcactaatatcttcagttgatgtgcacggggttaactccatcttttttcatttctttgtagtaatttttaaacacagtgtattgatattgggttaacccgagaatttacactttatgtaatacaaagaaaagtggaggaaaagtgatgggaagtttacgattacatatagaaaataaaaaaagaaaccaagaactaagaaatatttgtttatattcaattgcaaaaacagtatcactattcggtagctcaatttatagttttgcattaggattgtatgttttacaaataaccggatctgcgttacattttgcgattacgctcatattaggaacgattccaatgattgttatgaatccatttgctggtgtcattgctgataaggttgataaaaagaaactcgtcgtttgtatggatgtactaagcgggtgcttattaataactgtttatatattaagcaactattatggattaaacttattcattatttatactactacctttcttatgacagtatttacaacgttttttggaataggattaggggccgtaaaaccgaatatggttactaaagaacggttaatgagtattaattctataagtaaaattatcgattctatatctttaattttagggcctatgttaggggggattgtttttgcagtctttgatattaaaatttttataattataaatggtatttcatttatcctttcggctatttccatattgtttattaactttaaattgtttgagcaaaacataaatgaggaatgttcaattagagaaattaattttattgaagatataaaggagggatactcttacttattggagcggaaaagcttaaaaaatacttttagtattttaatttctcttaatttctttttaggctttgctgtaaccgttccgttgccatacattattaacacagttctcaatcttaattctaagcaatttggtatgattcaagggacttttccgataggtatgatagttggtgcaatattagtaaaaaagataactgattgtttttcttattcttatctattgaaaaaaataagttttatgttggcaatttttatgatagtttcaggaatacctgttttatttaaacctattgtagtaaataatttggtatatgttactacgtattgcatgattatgttctttttaggatttatgatagcacaaattgatattcctttaatgtatttcatgcaaaatgagattcctgaagaatatagaggaagagttcttagtattggattaagcttaggtaaaataatgcagccaatagcacttgcaatatcaggactgttattaaatttcattccagcctacacgcttcccattgcaggagggattgtattttttactttgaataaaattttagcaaataagttaaatttagaaattcattcaaaagattatagtgtttaacgtaacttaaaaagcgcaggatcagcatcctgcgcttttctatcgtaattcagctgtttttctaataacaatcttatcaatatcatcttcttcatcaccaataaataacccgcgctcttttaaatacgcttcaaaatataaatctgcttctgcacgttcatcatacggttttacagataaaacgaaacctaatttgttttgttcttctaaatgagaagtggagatgtaagccggtacattgtggcgtaaaaagagttctttaaccggaataatcatatctttcattaatttcgttaacatacccatttcaaactcgaaattaaagcgatctatactacataaatcagcgaatactacaccaataaaacctgtattaaatacttcttgatattctacttcttcatcattaccgtaaaaattcttttcgattaaataatttacaaaataagcaataccatcactttgttcaaatggtttcgttgaaagaacaaagccgattttcttttgtttatgtaaatacacacatgacatgtatgctgaaatgttatgttctttaaatagagaacttgttgccccagagaggccatcaagtacgtgatgaacaatttgaagttttttacgagcgaaataataggatttcttttgtaactccaatgtatcaataaagacagagccgataaagcctgtatttgaaatgataggtgtttgcttttttcttcctctgcgctttgcttgagccattgtaaaaatcatcccttcatgtacaattaaaataaaaagaacgtttgttcgtatatttatattttactattaaaacgctataaagtaaagggtttttgacgaaaaaaacaacaaaaaagacacctgtaaagggtgccttaaacgctgtagggaagagggttcatccctacaatttatattatgatacagaaacaatctcttctgtatcttctccatctaaatgacagtccatagtacgaacatcttgatcttcatgacttccgaaataaatagtaattttcatatgtatcgctcctcgtatagtatgtttaaacttaatttttttactttcatgagagacctgtaaaattagtttgtctagcatctaaaataaaaattgacgtttcacgttgtttgtttcgttcagttttcaaagaacttgtccgccgcttcagaagcgacttcaccatattaacatcttcatttttcgatgtcaactaagttttaaaatttcttttttgtcgttttctgcgtttccgcatcagcgacgtttattaatataccatcacactttttaaataacaagtgtttttttataaaaatataaaaaaattatctaccctactttcttctatagaaataactattatcctctctactaaaaatagttattctgattgtatactactacacttcattcaaccaaattgaatttcacaataccttcccaaattttcattctcttctatattaaggtttataataattatccttctataaaataactatacaaattagccgtaagaaaaaatcccatctacattaaacagccactcgcgcgcattatccccttccttctcattcgaaaattcccccctacaaattaacaacattccaatcctaatataaacttaaggatattgttagaatttttttacatttaattaatgaaaaatatccattttttgttatatagtaagaaaggacgcactcaactataaataaaccaatggaggaattattttatggataggttaacaaagttttcattaaaaaaccgagctgccattatcatcatgatctttctcatttccatactcggtgtttattccggctctaaattacctatggaatttttaccaagtatcgacaatccggcaattaccgtcacaaccttatctcaaggactcgacgctgaaacgatgacaaaggatgtaactgatcctctcgaaaaacaatttcgcaatttagaacacgtcgacaccattacttcttctacatacgagggattatcacgtatcgacattgcgtatacatcaaaagcaaacatgaaagatgcagcacgcgaagtcgaaaaagccgtcaatacaattaaattacctaaagatgtaaccaagcccgtagttagtcaattaaacacttctatgattccactcgctcaaattactatccagaaacaaaacggtttttcaaaagcagatgaaaaacaaattgaaaaagaaatcgtaccacaactcgaaaacattgatggtgttgccaacgttatgtttttcggaaaatccacctctgaattatctatcgtacttgatccgaaccaattaaaaaacaaaaacgtaacatcacagcaggtactaactgttttacaaggaaaagaaacttctactccagctggggcaattactgttaatcaggaagaatacaacctccgcgtcattggggacataaaaaatgtaaatgacattaaaaacatcactgtggcaccccaagtgaaattgcaagacattgctcaaattgaaattaaacaacactacgatacaatctcacatataaacggagaagaaggcacaggattaatcatcatgaaagaaccgagtaaaaatgcagttgccattggaaaagagattgataaaaaagttaaagagatagataaggaatataaagatcaattttctattaaacttttggcttcaacccatgaacaagttgaaaatgctgttactagcatgggaaaagaagtaatacttggagcaattgctgcaactctaattatcttaatctttttacgtaacttccgaacaacactcatcgctgttgtcagtattccattatctattttattaacactctttttactacatcaatctaacattacgcttaacattttaaccctcggtggtttagctgttgcggttggacgtctcgtcgatgatagtatcgttgtcatcgagaatattttccgccgtttacaaaaagattctttctctaaagatatcattctcgatgcaacgaaagaagtcgcagtcgcaattacttcttctactttaacaacggtcgctgtttttttacctatcggcctcgtagcgggagcaatcggaaaattaatgttacctatggtattagcagttgtatattctatactatcatccttaatcgttgcactaacagttgttccacttatggcttttttactactcaaaaaaacaaagcatcgaaagccaaattcttcatcacgatatgtcgctacattaaagtgggctctttctcataaattcattattctacttactgcatttttattatttgtaggatcaattgcagcttatatattactaccgaaagcaaacataaaatctgaagacgacacaatgttatctattaacatgacatttccagccgattataatgctgaatctcaaaaacaaaaagcatttgattttgaaaagaaattactttctaattcagatataacagacgttattttacgaatgggatctagcgcagaagatgcacaatgggggcaaacaactaaaaataacctcgctagtatattcgtagtctttaaaaaaggttctgatattgatcaatatattaaagagttaaaaaaggaaaataaaacttttgagcctgctgaacttgattatataaaaacaagttattcaagctctggcggcggcaataacttacaatttaacgtaacagctactaacgaagcggatttaaaagaggcggctactatcgttgaaacaaaactaaaaagcatggatgatctttctaaagtaaaaacaaatttagaagactctaaaaaagaatggcaaattcatattgatcaaacaaaggctgaacaactaggtttaacaccagaaatagctgcgcaacaagtagcattccttatgaagaaatcacctattggcgaaattacaattaataatgaaaaagctactattatgatagaacacaaaaaagaaaacattaataaacaagaagatattttaaatacaaacatactatcacctattaatggaccaatacctttaaaagacatcgcaactatttcagaaaaacaaacgcaaacagaaattttccataaagacggaaaagaaacaatccaaattacagccgaagcttcaaatgaagatttgagtaaagtaaacacagcagtaaataaagcgatgactgacttagatttacctagtggtgcaaaagtaaatatcgcaggagctactgaatctatgcaagagaattttacagatttattcaaaattatggggattgcaatcgggattgtatatttaattatggttatcaccttcgggcaagcacgtgctccttttgcaatcctattctccttaccgttagctgctgtcggtggtattttaggattaatcatttcacgaacacctgttgatgtaaattccttgatcggcgcattaatgttaatcgggattgttgttacaaacgctattgtattaatagaaagagtccaacaaaatcgggaacacggaatggaaactagagaagccttacttgaagcaggttctactagactacgcccaattattatgacagctattacaacaatcgttgctatgctcccactcctatttggccaatcccaagcaggaagtatggtatcaaaaagtttagccgtcgtcgtcatcggcggtttggcagtctcaactgctcttacattagtagtcgttccagttatgtatgaactattagataaaatcgggagaaaaagacgctcccgtaggaaaataagcacttctacagaaacacctgatatttaaaaacaaaaggcgttaccttcacaaatgaagataacgccttctctctatttattcataaaatccatcattttttccacatattgctctataggtttactagaatccacaatccaaattacatctgttcttctttataattaatcacaaattcaacaatcattacatccattccttctatattaaaatacaaaagaaccccctacctataaatagagagttcttctttataatttatgccgcttttacctttttcgttgttttactttttcttttcgttcctgtaaagcgcttgtgtaatatagatgctatcaagcgtgaaataacattgaatagtaataccataataattaatacagctgcagattttgtcgcaatcaacttcgcatctggaataactccttcagaatttaatttccaaatgtgaaccgctaatgtttcagctggtctaaacggatttaaaggatgcgcaggacttgataaatccgctgctgaatttaaaatcggggatgttaaacccgctgtgtaaattaatgctgccgcttccccaaatatacgacccgccgctaaaataatccctgtaataatttgtggtaatgacgatgggataataatacgagcgattgtttgccacttcgttgcacctaatccaagacttgcctcttttacattatgaggaacttctgaaatcgcattttcacaaacacgcgttaaacctggtaaatttaaaatagttaaagcaagagcaccacccattactgtgtatccccaacctgtcattgtaacgaacactaacaaaccaaataaaccaacaacaatagaaggtaaagacgccatcgtctctatacatagacgaacaaaatttaaaaaacgtccttgttttgcgtactctgctaaatatattccagcacctaatccaagaggaatagatataataagcgttataacaagcatgtagaaggaattgaataactgcggaccaatcccaccaccagctcttgtattgcttggttctccaaacaagaaattaggatcccaaaatccccatcccttttgtaaaatttcaaatactaagaacactagcaaagctacaactaaagctgcaaccgcataaaagatacctgtccaaactttatttaccgttcttgcattcattattatcgctcacctctttgcccaatcgctcgaattactaaaataaacaggaatgaaataacaagtaaaatcatcgctaaagtccatagcgcattgttccaagcagttccgttcaatgtattcgtcatgtccattgttaaaataccagttaacgtcgctgtcggactatatattccttctggtaatttaatcgtattcccgattaccatttgaaccgctagcgcttcaccaaaagcacgcgctaaacctaaaacaacacctgttaaaatccctttcttcgcagcaggaacaattactcggctaatcgcttgccatttcgttgatcctagaccataagaagcttctaaataatcaaatggaacagaacgtattgcatcagaagcgatactagcaatagtaggtaaaatcataatacttaatacaacaatacctgcaattaagctaaagcctactcccccaaacgaatcacgtaatagtggtactaaaatcgtaacacctaataatccgtatacaaccgaaggaataccaactaacaattctagaacaggcttcaatactttatttccaaactttggcgaaattaaattcatgaatatagcaagagctatagcaattggtgcactaataataaccgcacctaacgaaaccaccgttgaacctacaatgaaaattaaagccccgaaggatccttgatcagcatttggattccattttgtcgatgttaacatctcagtaaatgagataccactttgtgtaaaagattgaatacctttcccacaaataaacgcaataatagctaatgtaattaaaacaataaaaataccacaaaacgtaacaagtgatcttcctatatattcactttttacgtaattaatttgttttttccccttcatcacaggacagaccccacttcacagattgaaatgaacaggactggccttgcagccagccccataaaattttattacttatttaatttagacattggaatgtagcccatatcttctacttgcttttcaaaatctttaccttttacataatcgatgtaagctttcgtcgcttccttcgcttcaccttttgttaccatatattcgtaagaccagaatggatatttaccagacgcaatgttttcaactttcggttcagcaccatcaattttcactgtttgtagtgcgccttttttctcgccgaccatgtaagacattgctaaataactcaccgaaccaggagtagagttaatcgcttgctctactgcaccgttagaatcttgtgttgtaccagttccatcattaattttcgcgtctttcataatcgttttttcaaatgtagcacgtgtaccagatgaagccggacgattaattacattgattttttcatcttttccgcctacttctttccagtttgttacttttccagtgaagatatcttgtacttgttgcattgttaagttatcaacttttacatctttatttacgacaagagcgaatgcaatacccgctaccttgttatctactaattctttcgccttttcagcatcttttattttatctccggacggaacatccgaattaccaatttgcactgcaccagatgctacttggttaatcccagttccactaccgccaccttgaacttgaatagaaacttttgaatttttctccatgaatttctttccagcttcctccgcaagaggtagaagagctgtagaaccagccgctgcaatcgtacctgataattcttgttttgtattatcgcttcctttagcagtttctttactagttgtatcttctgctttcccacaaccaactaatgctcctgctaccactaaagctgctaaagaaaatttaataccttttttcataaccatgtcttgtacccccatttggattatcacttttcgaattcattttctttcgaacacaaattcattgtaggacaacaatattatgtgagtgttaagcaatttttaattttaagtaaatgacgataataatccttaaaagctagaaatcccaacatttatagttaaataacccaacaaaaaccacactaactacgctgcaatgtaaatatattcttaacaatgtaaattcaatgtaaatgtttttctatctttttcccttttcgttaaagttacatttacaattccgctgtattttgtaatttttacacacctaatttatgcacattaaaaataatttcagtaatattttttagtacaactaaataaattggaacaattctaaaaataaatgaatatttttaaagtactaattgacaacataatccaatgtagtctactatattactaacaaaaagtttaccttaggaaactttttaaactcaaactaaaaatatagagatgaggtaacttttatggtatcggctaatataaaaccactttccgaatttaaaataggagagtttgtacaaattgagaagatacaattagaaggaactatgaaacgacgcttattagatttgggatttatcccgggggcgacgattaaagtattgcaacgcagtccacttggagatccggtcgcttatcaagtgagcaacacaactattgcactgcgtaaagaagaaagctcccttattttcggggtattaataggagatgatttcagatgagcaaacatcgtatcgctttagctggtaacccgaatacagggaaaagtacattatttaatactttaacaggcttaaaacaacatactggaaactggacgggaaaaactgttttaaaagctgaaggagaatatgaacataacggaagtaattatacattaatagatttaccgggaacttactcactatactcaaattccgcagacgaagaagtagcgagggattatattatatttgaaaaaccagaagtaactgtagttgttatagacgcaactgctatggaaagaaatttaaatttagcactccaggtgatggagatgacaaataatgtagtcatttgcattaacttaattgatgaagccgagaaaaaagggattgttatcgatgaaaagaaattagcaaaatcacttggtgtacctgtcgttaaaatttcagcacgtcaccgagtaggtattggtcatttgctaaatgttattgcaagagtagcaaataaaaaactaattccaacaccaattaaaattacttacagcgaaaaaattgaaaatatgattcaggaattagaaccacaaatttataaagtgttcggtgatacgtatccagcacgttggattgcgttacgtatattagatggagataaaaatttcttaactacacttcaaaaacaccataatgaaccacttgtaagggaggtcgtaattaatggaatctcactcagccagtaaaggtcttccattagactatattattcaacatgcacaaacactttcaaaagaagatatacgagatgatatagtcggagatatttaccgaacatctgcaagcatatgtaaagaatctgtccaatatacaaatactgataaattatatcgttccgaaaaactagataaaattttcacatctccaatctggggattcccaattatgctcggtattttatctattattttttatcttacaattgcaggcgctaacgtaccatctgatatgattgccgaattcttcggatgggccgaaggatatttaacatcttggttccaagcagcgcatgcacctgaatggttacatggcattttaatacttggtttgttccgtggtatcggtgctgttattagcgttatgttaccacctatggcaatctttttccctatgttcgcgctattagaaaactacggatacttaccacgtgtcgcgtttaatatggaccgcttattcaaacgatccggcgcacacgggaaacaatctttaacaatggcaatgggatttggttgtaatgcagcagccattatgtcaacacgtatcattgaatcaccacgtgaacgtatgctagcaattttaacgaacaacttcgttccttgtaacggtcgctggcctatgttaattttaatggcttcactatttatggctgctggttatacaggcagtatgcaaacattggttactgctggcgttgtagttggaatggttgtaattggtgttattatgacattaactgtttcttgggtactatcaaagacagccttaaaagggattccaactcactacacacttgagttacctccgtaccgcaagccaaaagtttggaataccattgttcgcgcaacactcgataaatcaatctatgttttaaaacgagctatagttgttgctgcccctgcggctgcattaacttggttacttgctaacatttttatcggtgacacaagcttacttatgtattttgtaaacttcctagatccatttgctaaaatgttaggacttgacgggtttattctagctgcattcattcttggactacccgctaatgaaattgtaatcccaattttattaatgtcttacttatcaactggggctttaactgaaatagatgattttaatcaaattaaaaatctattcctagaaaatggttggacttggttaacagcgttaaacacaatgttgttctcacttcttcatttcccgtgcggaacaacacttgttaatatatacaaagaaacaaaaagtgcaaaatggacattcttatcgtttgcaatccctaccgttatcgccattgttgttacattcctctctacacaattggtacattggttagggcttgtataaagcaaagcatacatagaaggtatcccccttcacatatgctttgcacgaaagaaacctgaaattattcaggtttctttttttgcacatcagtattccacggctgtgctccatacgttgtgagttttttatgaataaaatatatagttcctggaagaactgccattaatatcgtgcaactaattcctaatccagtaaacaactttcatcaccttatttcactcttttcggtaaagctgaacctgaatgttcaattgttggatgaacatgaacagtaatttcagcattactaaagtaattttcgccttgatcccaattcttacttatttttgtccactctttataattatgtcgcttatacacttcccctaactctaatacatctaccttatattttttttgaacaagcttaatcgatttttgaatacgctcctccatttcttccgatatatccttctctaaacgcttttcattcaaaacctttttatgatcactgaaatgcaactcagccaatgtgccttccagagataaatgaatatcaaactttggttttgtagcattcgttgtagatactttaatttttcgacgcaacttatgaatttcatatgtaataagttgattttttttacgaatcgtaaaaaaacctccaatttttttgcctattatataattcatccctaatgtttcttccccactcaaattgcctacacatttattatcctttccacgaaacaatgctgcaccgttcatttgtaccccttgttttgtcagttcaagaataggtaatacaaaactgcggttagagatcatcttctcctgtacctccccaattcttgcagcctcaatcatttgggcatttttcggagggtgttcagctaacatatcaatatactgcgccggtaaattttcaggcttggcactttgttttaaaatagcttctgcatttttcttagaaacgaacaaacgaatatttcttctcatttcatgatcgcgaatatatacatctaacgtattttgtaaaatgtatggatgtgaaagtaattcttcagagaaaataatcacttgtatatgagggaaaaataatgtacggctaatttttttagcgattattcttatttgttcaaatacactatctgcttttgcactaacattaatataattttcgctatccccacccccttgtccaccctgttgagacaatttactggggagtaccatctgataggtccctttcataattggattcgctttcttctccttcacgatatcgtaagccgctcctactacaaatcctctttcttctatctcttctaactcagaacacccactcataaatccagttaaagccataaccattataattttaagaaggtgtttcatttccaccattccttctttttattttatatacaattaaaacgagcaaaggtgctaacacaacacaccccatatctatccaagctaaataagtcccataacttgataaagcattcaaactactaggtatcatattcgccataaaaataattggggcacttacgaaaataaaaatatgtttcttcactttcggaaacatagcacaaaacaataaagatgcgacatcatagtacattgctgtcgtgttataaatagtaataatccaagtcgtaaaaaaaatcgcatcaaacctttctaaaaatcctccaccaatttcaatttctttccctaattcaattgttggatatgtcaatccacgtgttgtcatatacgtaaaaacactaatacaagttacataaattaaaatgtatgacagcacgtttaccatcaccgctttcgcgactgccatcggcgcttttttcgctgtcttatcattcagcaacaccgcataaaataaagctacttcaaatccaataaacgtaaaaatagaatttttaactccaacagcatattgacttactttcgtttgaaaagctggtagtaaattatttatttccattaaatttatattcaataaagaaagaagtactatcgcaattaaaacaataggtaagaataaaacatttaaccttaataaggctgctcttgatcctgctattccataaataacaactaataagaagaagaaagacagtagttgtattggtgtatcactaaataaatacgtttgagaaataactgaaatcattcgcgattcatatgctgtcaaagcagcaaacgttaatactaaaatacaactaattgtgtatgcaacaggcttcgtcaaatgcgcactcgtatattgaacaaaattttgttttggaaataagatagccactctcgtcacaaaccagcctaaaactgcgcaaatcaatccacccaaaagcaagataatccaaccgtccgaaaataaagtttggttagcgatatctctcggcatagacaatgcccctataccaataatggtcgatgataccgcaaacccaatttcccgagatccaatctcttcatcgccatactcaaatggtttcacttattttcgctcctttggacgtattgtagaatcttttgtttgtaagtactctggtctatctttcaacatcgattttggcatgcgaataaattcttctttccaatctttataaaatgcaggagcaataggagttgtatacggtataccaacacttgttaaatttgtaatatgaatagcaagtgcaatcagagctagaatgatcccatacagtccaaaagccgttgcagctaatacaaagacgaaaagtaaaattcggaacgtaatcgtaatactatatacaggaagcgagaacgtagcaatcgcagtaactgcaataataataactaaaaacggatttacaatccctgcatttaccgcagcttctccaattacaagacctcctacaatccctatcgtttgtcccattggtttgggcaatcggattccagcttctcgtattaattccatagtcaaggccatcattaacgtttcaatatatgctggaaacggaacaccttccctcgcacctgcaattgaataagccagtttagaaggaataagtccttgatgataagatacaagtgctacatacatagctggtaacaaaaccgcgattatacctgaacccatacgtaaaaatcttagtaacgttccaatcacccagcgctcgtaatgatcttctacagattgaaaaatatcaacaaacacaagcggtgcaataagagcaaacggagatccgtctactaaaatggccgcttttcccttcgctaatgacgctataatattatctggcctctctgtattcaaaaactgtggaaatggagataaattattatcctgaattaattgttcaatcgtacctgtttccaaaataacatctgtcactattgattgaagacggcgatctaactcttttacaatgtgaggattaataatatcttctatatatactagggttacttctttctgcgatcgcttccccataatataagattggaacctcaactttggatcgcgtaaactgcgtcggattaacattttattcacattaatatcttcatttaatccaactcttggtccgcgtattaaatcttctgtcactggtggctctaaacttctcttctcccaagccctactattaataacgatagcagtttgaatattatcaattaatataactgtatctcccgctaaaatcgcatttataatatccggaaacgttgtcttcttacccacttccgcaatagaaataaaatgatccaataacgtctgaacgacagccgcttcattttgcacttcttcatattgaagagtacgaactacatatttataaacattatccttgtctgttaacccacataaaaacacaaccgcacaacgtgtaaaactcccagcaagaacaacttctctaattgttaaatcattaggtgaacctaactcatccctaatttctttcataacttcaaataagttaccttcaagctctaacaatttccccacctaacttccttttcaacaagtttttagttagattccgctaattgaagaaaatatatacaaaaaagagctatctcttttcaaagatagctctaataaagtaaaactttaatcagccctcaccaatcggacttttacaggcagcagggcccctacctaacttctttgcttccgctgaattttgagttgagggtcttactgcccgttaatgcgggataaacgaattacttttctactattatattgtttttctttatagatacactttttgtaaacccactaactacaaacatcacaatcatattaattaacaatgcgactatgcctacattcaaatcttttatatactgcgggaaactcggaaacattgtggctatagttgaaccagataaggtaatatatgcgaccactaacagcccaactcctattcctgcaatcgctccttgcttcgtaataatttggcgtggaaacaagctacatacaagtgcagggaaaagttgtgtaacaatactgtatcccattaatagaagcgctcctatcgtttctcctcctttaaatgtaaataaaactgccacgagcgttactacaggcacaaataattttgccatcttagcaacttgtctatctgaagcagatggaactatcgttcgataaatatttttcgctaacagtgtagaagccgccataacaagcatcgaacccggaaccaatgccgttaatactcccgcactaccaataattccaataaaccaaggatcaaaagtttgtaaagcaagacggaataacgaaagatctacatccgctccctttaacccaggaacttgcaatatagcagcaaatcctgcaaaaaatacgaaaagtaaaactaaagaatacaatggcataattgctgcatttttacgaaatactttttcattttttgcagaaaaagcagaagcaaatgtatgaggccacatataaaaaccgagggccgttaatataatagtagaaacaaaccaagaaatactcattccttcttcaggtaaagataaaaatcccggtttcgctgcctctacagcctcaaacatcggctgaaatcctccataataatgatacggtaaatatatacctaaaaacataacgataaacagtatcataatatccttcaaagcagccgtccaagccgaaccatgtatacctgaaaccattacatatatagttataacaatagcaccaatccaaaccgcaacaacaggtgacacccttccgtaagaagcttctgaaacgataattcccagtccttttaactgtaaaacaagatatgggatgatggaaacaacaccaacaattgaaacaataatcccaagcgctttacttctatatttcttcgcaaaaaaatccgactgtgaaacaaggttatgctctttcgcatacttccaaatcggtggcaataaaaaatacgataaaagataagctaaagcgccataacctaaaatataaaaggtaggtgctcctttgctatacgcccagccacttcctcccaaaaatgtaaacgtcgtataaatttcacctgccataaggagaaaaacaaaaatagtgccaaaccctcttcccccaactgaccattgctctaaattcatatcttttccatgttgtgcccgaatccctaaaaatagtgcgagaaacaaaaataaaataatgataagtaatgcagtcattttacatcctccttattagcaggatcaaacacgtacacaagccccatacaaaaagatgtaataaacactgataataatacccaaaataataaaaatggcatccctaatacgtaaggagtaactgaattcgcaaatattggcccaactactaaacaaagaactgggataagcgctagaatgtgtattttcttcatctcattctcctttacttataaagttcataatggctgatacaaagacttccactccaatcagtaatgcatcttcgtcaatcgtaaaacgagggtgatggtgaggatatataatacctttctctttatttcccgctccgataaaaaagaatgtccccggtgccttttgtaaaaacgctgaaaaatcttctccagccatcgtcggctgtaaacgaacaactctatcccttccataaagttgtaatgccgtttgttcaataagctctgtagcttcatagtcatttacaactggtcgatacccatattcatatgaaaatgtatatttcgctccgtaagattccgtaatatgcttcacaatccgctcaatcttcttctctgtttcacctcgtaattcatgtcttaaacttctcactgtcccttcaatctcggcttgctctggtattacattatgagttgtccccgcatgaaattgcgtaacagatattacgagagaatctaatggattcgtgaggcgagatacaatttgctgaagttgcgaaacgacttgtgttccgattgcaatactatccaccgtttcatgagggattccagcatgtccaccttttccctctatcttaattttaaaaacatccggtgcagccattgcaggaccataaataacacctattttcccaacctctaacgacgcccaaaggtgagcaccaataatataatccacaccttccattacacctgcagcaaccatctcctctgcaccaccaggaaaattctcttcagcatgttggaatagaaaacgaatctctcctttaatcttctctctttcttctactaacttatgtacaaccccaagtaatatcgctatatgtccatcatgaccacatgcatgcattacacctttatatatagaaataaaatcaaactcattttcttcatgaataggaagagcatccatatcggctcgaatcgcaactgttttgcccggatgtttacctactaactttgccatcacactatatttagtcggccgtgacacttctaaatatgggaatttccgaagtatatcgaacacaaactgcgatgttttctcttcttgaaaagataactctggatacttatgaaaatgccttctccactcaactaactgattttttgacaaaacaagttcctttgcaacatccatttctcttctccccttcttcaccaagttaaatgttattataacgtgaattgttaacttttaaaagaatcttctgaattttcagtgatggtaaactaaaaagaaaaagccatccaaaagatgactttttcattattataaaatagtaattgcttgttttcccatttgctcccaagctttctcaaattctgctcgcggaacagccaagcgcggattatttttaagaggatcatttacatatacaaagttttgatcatatccaattactactgcactatgctcataatatgtaattttcacttcgcctgaactcgtattccatgtttcaaaactactttcagctagcggcttaaacgtcgtattaataatgacccataccggagaaccagaactaattactttatatatatcttgcatgtctctacctgttaaattaattactttttcaggaacatatttttctgctaaatcaaagattggtttattgtatacaccatatccaggctctgcctttgtataaatatttcccacaaatccctcgtaaggatttccacgcaaaccattttgttcaaatggaacacgatgaatttcgctagcaagttgcatcttatctacttgtacacctttatattgcagcaacatagctaaacttgtcacttcacatcctcgaggtaattctggtaattgtttaataaacggaacatcttcaatcatagctgcttctttcatttcagatagaaactctaagcgtagaacttgcgccttttgcatgattttatcttttcctataaaaaatgcagcagcaagtataattccaaaaacaaaaagatattttaactttttcattataaacaaaactccattaattattattttacagatacacctcttatcattgtacccttcttcttactagtttgctagaaagatcatgtgaattatcgctcatagaattaattataaaaattctaattatttttaataaaaagaaaaataaatatacatttacagaatattttgctaaaatcaaaattgttaacatagtgaagatatcaccatgttaacaaacattcttagagtatttagtcatagttcgttttttacatactccattcatttcatagcaaataaaccgagtgtgttttgcatcccccactaatgattaaaaactcagaataaaacgaagtttacacattcaagaaaatacggggtgaggggcatatgaatcaacaaattgaacaaacagatttaaaacgaacaatgaaaagtagacacctatttatgattgcactcggcggtgttatcggaaccgggctatttatgggatctggtcaaatcgtccataatgccggacctggtggtgctattcttgcatttttagtcggtggatttgttatgtatttaacgatgttatgtcttggtgaattatccgttgctatgccagaagcaggttcattccaaagttatgcaagcaaattcatttcacctggttttggatttgttgtcggttggatgtattggttaaattgggctgttacagttggcgtagagttaacaactgtaagtattttaatgaaacgctggtttccagacgtttcttcctggatttggtgcgttacatttgcagcagcactcttcctcgtaaacgctttatcagcaaaagcatatgcagaagcagagttttggttcgcaagtgtaaaagtcgcgacaattgtcattttcatcgtgcttggtggcgctgttatgttcggtctactagactttaatggaaagccagctccaatgcttcataatttcactgaaaatggcgggctatttcccaacggtgcattagctgttcttcttacgatgattacagtaaattactccttccaaggaacagaattaattggaatcgcttcaggagaaagtgaaaatcctgaaaaaacaattccaaaagcaataaaaaatacaatttggcgaactctcttcttcttcgtcttagcgatatcagttgttgtaggtttactcccatggcaagaggctaatctagttgaaagtccctttgtacttgtatttgatgtagccggtgtcccatatgcagcagatattatgaactttgttattattacagctgtattatccgttgctaactctggtctatatgcaaattctcgtatgctgtgggcgatggcaaaacaaggaatggcaagcccagcatttacgaaattaactaaaaaaggtgtaccgctaaatgcattaattttcagcctaattttcgctagcctgtccttactaacaagtgtatttgcggcagatactgtctttctagttttaacatctattgcagcaatggctgccgttgtcgtttggatgtcaatcgccgcttcacagtttttcttccgtagaaatttcgtgaaaaatggtggcaacataaatgatttaaaatatcgtacaccgctctatccactcgttccaatcgtagcgttctcgctcaatttcattacatttgttagtttggctttcattccagatcaaagaattgctctttattgcggcattccatttatgattatttgttacattttataccaagttaaatataaaaaaattgtcacacttgaacagccacgaactgtcacacaagaaataaactaaatatacaaaatattcagctatcttccttatcataagatagcttttttctatttcttggatatcctggtataactttatttatcttaaaattttcacaatcacgtttttctctggaaaatagtttacaatgtaatcaagttacaaatgatattcaccttaaaaagtgtgcatttgtgtctattttttaacaatatatcaaaaactattgccttctataaattaataggtttatattgttttattggcatagtttcaatccaaggagaaaggagattttcaatcgtgcaactaaagaaagcgttttggaagttggcttcacttcttccgttatcattacttctgttcctcggtggctgtgataaaaaactcgcagtattaaatccgcaaggacctgttgcaaaagcacagtatgatttaattgtttggtcattcttgcttatgtcattaattatcgcaattgtattcattctgtttacagtcatcttgattcgttatcgtgaaaaaccagagaatatggactatgagccacctgaacaacacggtaacacattactagaaattatttggacgcttgttcctgttattatcgttatcgcattatcgattccaacagtaaaagcaacttatgcttcggaagaggttccgaaagagtccaaacatattaaaccagttgaaatttatgttacatctgcaaactggaaatggttattcagttacccagaggaaaaaattgaaaccgttaactatttaaacatcccagctggtgtaccaattcaattcaaactgacttctgtcggcccaatgaatgctttctgggtaccagaacttggtggtatgaagtacacaatggatggcatgattatggatctttatttacaagctgataagccaggttcttacctaggccgtagtgcgaacttctctggtgaaggattcacacacatggagttcgaagttgaagcaaaaactaaagagaaatatgacaagtgggttaaagaagtacaagaaactgctcctaaactaacagaagctaagtacaacgaaattgttaaaccaggtgtagttggtcgtatgacattctctagtcaccacttaagttatgtagatccaaaatcacttgaatattgtgattataactactacaaaaacaaaaaataatagctattattccaacagattggagtgaacacagtgaagcttgatgaattctttgtcacaggtgacccgattatttacggtgcagacgcttctatcgttcttgtgacattagcaatcattttcgtactaacaaagtataaaaaatggaaatggctttgggacgaatggttgacaactgttgaccataaaaaaatcggagccatgtatattatttctgcggttatcatgttattccgtggtggtatggatggtttaatgatccgtgcacagttaacattcccagaaacaacttatttaaacgctgaacactataacggaatctttacaacgcatggtacagtaatgattcttttcatggcaatgccattcgttatgggattaatgaaccttgtagtaccattacaaattggtgctcgtgatgttgcatatccgttcttaaatgctttaagtttctggttattctttgtcggagcaatgttattcaacatcgctttcgtaatcggtggttctccagacgctgggtggacttcttacttcccaatggcaggtacagagtttacttcaggcgtaggaaataactactacgcaattgcattacagatttcaggtctcggtacgctaatgaccggtattaacttccttgttactatcttaaaaatgcgtacacctggtatgactttaatgagaatgccaatgtttacttggtcaatcttaattacaacaattatcattattttcgctttcccagtattaacagttgctcttgcattaatgacatttgaccgtctattcgatgctcacttctttacgatggcgagcggcggtatgccgatgttatgggccaacctgttctgggtatggggtcaccctgaagtatatatcgttattttaccggcattcggtattttctctgaaatcattagtacattctcacgtaagcgtctattcggttacagtgcgatggtatactcaatggttgcaatttctttactaagtttcgtcgtatggcttcaccacttcttcacgatgggtgcaggtccagcggttaactcattcttctcgatttcgacaatggcgatttcgattccaaccggtgttaagatctttaactggttgtttacactgtataaaggacgtatccgttttacagttccaatgctttggtcattggcatttattccaaacttcgtagtcggtggggttacaggggttatgcttggaatggcagctgctgattatcaataccataacagctacttcctaatcgctcacttccactacgtattaatcgcaggtacagtattcgctatgcttgctggattcacattctggtatccaaaaatgactggtcatatgttaaatgaacgcctaggtaaatggacattctggatctttatgagcggattcaacatctgtttcttcccaatgtacttcttaggtttagacggtatgactcgtcgtatgtacacttactctgaaagtcttggatggggatggctaaaccaaatcgcatctgttggtgcggtaatgatgggtatcggcttcctacttctttgctacaacgtaatttggagtgcacgtcacggtgaacgtgacacaactggagatccatgggatggtcgtacacttgaatgggcaactcactctcctgtacaacattacaacttcgcgaagcttcctgaaattaaagaagctgatgctttctggtacatgaaaaaacgcggagaaacagttacaccagcagcagaagatattaaaccaattcacatgccaagtaactctggtgtgcctattattgcgtctggattcttcggtcttgcaggtttcgcattagtatttagctggttctggcttgcagcaatcggtggagttggtattttagcttgcttaatctatcgttcattcgattatgatgaaggttactatatcagtgttgatgaaattaaaaaaacagaacatatagcatgagaggtgaaatgacatggcggctttagataaaagcttacctttggaatatcaatccgaacaaagcagattgaatatcctaggattctggatttttcttggggctgaaattatgctgttcgcaacacttttcgcctcttatctagtccttgctggtcgtacggcagatggcccaacaccagcgcaattgtttgaacttaaaacgcttttaattcaaacattactacttttaacaagtagttttacatgcggtatcgtaattcatgaaatgcgtaagcataaccaaaaagcgatgcttggatggttcgtccttacattacttttaggtgcaggtttcctattctttgagattgaagagttcattatgtacattggtgaaggcgcaacaattcaaacaagtgctttcttatctggattcttcgttcttcttggaacgcacggagctcacgtaacaggcggtatcatttgggcaacttgtgttattatccaaattttaaaacgaggtttaacaccagttacagctcgtaaagtattcattatcagcttatactggcatttccttgatctagtttgggtctttatttacacactagtttacttgaacgggatggtggcgtaaatggctcaaaacaacaatcaagcaaacgggcatgcgcatagcggattcccttggtcacacgttttcggatttattttatcgcttgcattaacgtttctagcgttatacgtggcactttacacaacattgccactttcaacagtcttaacaactattatcataatggctgttgcgcaagcattgttacaattaattatgttcatgcatttaaaagaaggagaaggaagagttcaaattcttacaatgatatacagtttcttcgttgcaactgcaacagttggtttaactgtatggatcttcttctcaatgtaatgtacatgaaaaagactgctgagattcctcagcagtctttttttatcccctcccctgttacatccacattacggaattaacaacagaatcatgaaaaatatacttattatgacaaatgttaagaaaaatctttctttatgaaatcgaatccatatgcgttgcttttctacctattatatggctaaataggtactatatttatttgaagggagagaacgcaatggaacatcatacttctgttctatcacttatggttgtcgttgcaatcgcgtttttcgttccccttttgttacaacgctttaaattaaaagcacttcctgttgtcgttgcagaaattattgcaggaatctttgtaggtaaaagtgggtttaatattattgagccagatatatggcttcaagttttatcaacattaggatttatcttcctcatgttcttaagcggtttagaaattgatttttctatctttaaacaaaaagggaaaaaaaatacgacaaacgagccaaatacatttcaagtagcaagcattatcttcttatttattttcatcttatcttatgccctatcattactattcgtatggctaggatttgtagataatgcaatgttcatgactttaattatttcaactatttctttaggtgttgttgtaccaacattaaaagaaaacaacctaggaaaaactgcaatcggacaaatcattttattagttgctgttattgcagacttagttacaatgattttactcgctgttttcgtcggattaaattccgaaagcggtcaaagtatgtggctcttacttattctattcggtgccggtattgtcatttactttattgcaaaacgctttaaaaacattccatacttagatagtttaaaagctggtagtgtacaaattgatacacgagctgtttttgcactcattttaatcttagttgggttatcggaatctgttggagcagaaaatattttaggtgccttcttagcaggtgtacttgtatcgttattatcaccaaatgaagatatggtggaaaaacttgattctatcggctatggtttcttcatccctattttcttcgtaatggttggtgtaaatctagaggtgtggtctattttcaaagaaccttctagcatgctaatgattccaatcttaattgtaggactctttatttcgaaactcttaccatcactcgtcttaagaaaatggtatccacgtaatatcgtacttggaagtgcaatcttattaacatcgacactttctttagttattgcggctgcacaaattggtgaaaaactggagatcatcagtccaagtttatctgcctctcttattttaagcgcagttattacttgtatttttgcacctatattgtttaaaaaaatgttcccaaaagtagaaacaccaaaaccaaaagtagctattattggcgcgagcagaattacccttccgttatcactagatttaaaacgagaagattatgacgtaacgctatatatgatgcgtcaaaacaaaataaatgatgaagaagcgaaatcacatgacttccctatcgtgaaattagatgacatcacaatcgcatcattaactgaacaaacagcatttgatgcagatcgcgtcgttgttgcaacaagcgatgatgaacaaaacttattattggcagaacatgcaaaagagctaggtgttgaacatgttattgcaagtgtagaagatccacttctacaagaaaaagcaacgcaagaacatatcgctgtattctcaacaattaactctacacgtattttattacgtgcacttattgataaacctagtctcgttcgcttaattacaacagcaaacgaaacagtacgtgaagttgaactgcgcagcaataaatataacggcgttgcgcttcgccgcctcccgtttttaggtgatgtacttgtcattcaaatctaccgcggtaacaaagcattaataccgcatggtgatacaagactacaacacggtgacacattacttgtaacaggttcaaaagaacatatcgatacactaaaaaacatattagagtaaaaaaatgcccctcacataattgaggggcatttttttaacttcatatggtaaaatgttactatcacatattatgaggatggatcacattatgtctattgtaactttagctcttttattattagcagaaatactcgttgccattattctcatcggtgttagtattgagatttgtagttacggatggaaaaaatcgaatggaataaaatattcttgcctcctactttcactccttctcggaactgctagcatactcggacttctcgccgcacctgcttatttctttatacaattaacagaaaaggccttataagaaaggatgttaatatgattatcgtgaaaaatattgagggatctgaaacttacgtattacgtcaaaaaattttacgccccaatcaaacattagcagattgtaaatatccttccgattatgaaacagacaccttccacttaggcgcatttataaacgatgaactaattagtatcgcttccttctcaaaagaaatataccctgacctaccagccggtattcattatcgtctacgaggaatggccacattacctgagtttcgaaacaaccacgctggaagctccttaattcagaatgcagaacaaatcttacaagagcgtcaagcaaatatgttatggtgtaatggccgaattactgtaactgactattacaagcgattaggctttcaggagcatggtgaaatttttgaacttgaaccaattggccttcataaagttttgtataaaaagatataagaaaagctttcctcaatacgggaaagcctttcttatatttcaatcttctctttttatttttttcatatatatgtatataaacaaactaggaactaaaaaacaagcaaacataataagtcctgtcatactaatttcctttatcgaaatatctggtgttacaacgatacaaatagctaaaatcccaataataatacccaccggaatgaataatagcttcataaaataacgacgcgacactccgcccgtatgctcatacacttccactgaatttttcagatttaaaaagttaataattattatcccgcccataaataccattaataaatccgaaacactttcatatcctgccccttgcaagacatagcggtaaaagacgatagctagtatgacgatattttgtaagatgaaagctaatctaatatgttttaacccttcaatcattaaacgttcatctttcacgattttcatcctaccactccttttcctcccaaaacaaatcattcaacgttttatctactgcataacaaatttttaaacataaatctaaagatggattgtatttccccttctcaattaaactaatcgtttgccttgtaacgcctactttttctgctaattgttgctgtgttaaatctaactgaacacgcgcgacttttattttacttacagccattcatgttcctcctctatctatattgtaacatatatattccgttaagtaatttatattttacaaaaccaattaagttttcatcttatcccgattggtgcgggctaatacacagtgaggatatcccctactgctcatagtttcactttattatacacaaaaagggagcctcccataagaaggccctctcctatatttatattataagaataaatgacatccaaataagaatgcaaataagtatagtaatggatgtacttccatccctttacccttcacaattttcaagactggatatactaaaaatccaattgcgattccatttgcaatactagatgttaacggaatacctataaaaattaaaaatgctggtaacgcatcttcaaattcattccaattaatatctcgaatgctttgtgccattaaactacctactataattaatgaaggagctgtaatagcggctacacttgataaagaagcaataacaggactaaaaaatgccgttataattgttagaccaacaactacaatccctgttaatccagttttaccacctgcagcaatacctgctgacgattcaatcgtcgctgctgttgggcttgttccaaagatagaacctgtagtcccgccaattgcatccgcaataaacgctttaccaaaacgcttctctgtattgtctgtaattaaacctgcttgtttaattaaaccgagtaatgcacctgttgtatcgaataaaagtacaagtaaaaatgaaaatacaacgccgtataatccgtattcaattacatctgaaaaggcattgattgggtttgaaacgatgataccctctggtaaatgaggcatcgccacaattttatcagcaaacttcaattgccctgtaaagaaggcaataattcctgtcacaatcatactaataaataatgcaccgctcacacgcaatgtcattaataccgccgctaatattaaaccaattaaagttaaaataacagctggagaatgaaaatcaccaatcgtaactaaattagacggatgatccacgataattccagaaaggcgcaatccaataaaagcaataaatagtccaattccacctgcaattgcatgctttaaactatcaggaattgctaaaattaacttttgcctaaacgaagtaaaagataataaaagaaaaataatccccgttacaaatacagctgaaaaggcaactacatatgtaatcccttctgccttctgtacaacagaataagcaaaatatgcattcattcccatagctggagcaataacaattgggtaattcgcgaaaatcgccatacctactgttccaacaacggttgcaataattgttgctgtaaacgcttggtcaaatggtacacctgcatcagataatatttttggattgatgacaagaatatacgcaaatgtaaaaaaagttgtgatgccagctaaaaactcttgcttcacagaagtgttatatttttgtaattgaaacatgcttatgtacccttcctacacctgaattattatcacacattctttttcttactagtatgcgagaaaatataatacttaatcttaacaatcaataaaaagaagagtcaatatattccctaatagttcgaattttaagtttaagtctgacaagtacagatgtagtacagttcattatgattatttttgtagcataacagatagaaatgttttataatttgaaatagttaaatatttagtaaacgcattcaaatatcgttcactctacaagggggattcttcttatgcagcacacaaacaaatctggaactttaaatcgtggtttaaaagaacgacatattactttaatgtcactgggctcagctattggcgttgggctatttttaggatccgcttccgccattaaactagcaggtccttctattttgctaggctatatgattgccggtctcgttatttttttcattatgcgagcgcttggggaaatggcaattgaacaacctgttgctggttcttttagtaaatatgcatatgattatattggaccactcgctggttatattactggttggaattactggttcttatgggttgttacttgtatggctgaaattacagcagctggtatttacatgcagtactggttccctgatatcccgcgctggacttgggcattacttgctctattattaatgagcgcttttaacttcttatcggtaaaagtatttggagaacttgagttttggtttgctctcattaaaattgtcacaattatctgtatgatagtagtcggagctggtattattttattcggattcggaaacggtggtatcgctactggtatttcaaatctttggtcacatggtggctggttcccaaatggattttctgggttactactctccatgcagatggtactattcgcttatttaggcgttgaattaatcggcgttacagctggtgaggctcaaaatccgaagaaaacactcgcaaaggcaattgataacgtattttggagaattctactcttttacgttggggcattattcgttatgatggcaatttatccatggaacgaacttggtgagaaaggcagtccattcgtattaacattccagcaaattggtatcgcaaaagcagcaggtattattaactttgtcgtattaacagcagctctttcttcttgtaacggtggtttatttagtacaggccgtatgctatatacattagctcagcagaaaaaagctcctgaaagatttggtcgtttaaataaaaatggcattccaagccaaggaattgtagcaactgctatcgttttactaattggtgttatattaaactatcttgtacctgcaaaggtatttacatggcttactagcatttcaactttcggtgcaatttggacttggggcattatattagtcgctcaaattaaattccgtaaaagcttgcctactcaaaataaacaaaagttatcatataaaatgcctttatacccattaagctcatatttctcacttgccttccttgcactagtcttatgtataatggcgtattcagaagatacacgaattgcattgattgtcggcccaatttggcttatcggcttagcaatcgtatattacatgaaagggtttcataagattgatgaaacacctaactcaaaaattagttaagcaaaacatcccttccttattacttggaagggatgtttttatatctatataaatatttctcaacaaaattcacggtatttttacaattttttaatattttttatgttttccgtctttatttttacagaaaaataaattacattattaaagcacatatatttattattagggggattcttctatgaagaataaaaaatggattacattttctttagcaacagcaattacactaagtatagggacctcgttcataccgtctacttatgccgaaagctctgtagacccagctcctgaaattgctgcaaaagttgtaaatcaaaacaatgggaagaaagtattatttgataatacacacggtcaaactgctgggacagctgactgggttattgacggcggcttttctgacttcggaaacggcattgcaaaaaacggatatcacgtaaaggaacttcgtaaatcaacacctattacgtacgaagatttaaaagattacaatgtatttatcgtcccagaagctaatattccttacaaaaaatctgagcaggacgctatgttacaatatgtaaaaaatggtggtagtatcttctttattgctgatcattacaatgcagatcgtaataaaaatcgctgggactcttctgaagtatttaatggatatagacgcggtgcttgggataatccagcaaaaggaatgtctaatgaagaagcaaattcacaagctatgcaaggagtagaaagctctgattggctctctgacaacttcggtattcgcttccgctacaatgcacttggtgatgtttcagcgaaaacaattgtatcacctgaacaatctttcggaattacaaaaggtgtttcgtctgtagcaatgcatgctggttctactctagcaattacaaacccaaaactagcaaaaggacttgtttaccttccagaaaatccatcaaaatggaataacgctgttgatagtggcgtttataatggcggtggtattgcagaaggcccatatgctgcaattgcaaaagtaggacttggaaaagctgcctttattggtgactcttctcctgttgaagatgctacgccaaagtacgttcgtgaagattctggccaaacaaagaaaacttacgatggttataaagaagaaaacgatgctatcttattagaaaacatcgtaaattggttatcgaataaagagacatttacaagtttagatcaagtaaatggtttacaacttgattcacctacagctctacagacatttgaacagccaagcttatcaacagaaccacaacctgaaccttggggtgcaccaaatgcaggttatcaatggtttaatacaaatactttcaaaccaggttcatacggttataatggtgcggtaacaacaagcgactacgtcgttacacaccctagcattctaccaaacaatgaaattttccaaatgaagattcaagtaaacaacttactacctaatacaacttataacaactattctttaggtatcttcactactggaggaacacaagtggctaaagtacaaaatgcaaacggcacttggccatctacttttggatatagcagtgcattttctttcacaacaaacagcttaggctctgctgagaaagttgtaaatgtacagattgattcaaatacaattggacaagcaacgcttcgtctacgccaaaatacaacaacgaaatataatgaaactgtaacaattaataagaaataataaaaaaggcaatccatacatggattgccttcttctcacttctcttccttcgagaaaaacattcttgaaataacgatacctatactaccgacgattaggaataacactgccctaatcatcatcgatacctctggtaagtcaagtaagaataacttccctaccgttacgactaaaacgactaaaccagcatataatatttcattcatatttctatttcttccaaaccaaaccgcaaataatgcatataccatccataataacgatactgatacactaattacgcttccatctgtagataaaacttcaccgattctcgtaattgtaataaatacaattatcataaaccaatagagcactatagaatacatatatttgccgaagctcgctaatacttctttcgcttctctcatgcaataatagaacgttcctattaaaataagatgagcaacaaagcctgccgaaataaattgatcaaacgggctaaaaatagtctgtatcattccaattgcgtaaaccgtcgcactaacatacaattttatctgttgttttactttaatagaagtgaccatgccgaggaaaccttgtaataatagtacaatcgctgcattcactaaactatactcatataaaattgctaaactaaatgctcccattgcgaaaccaaataagagatttgtaaatgtagaatgtctatttttcctatattcaaatacgaacatagcggcatgcacgattgcactaataattaatccccatgttgtaaaatcaggtatttttgaaatagctagtataaagaacactgcatttgcactaaatatcgccaaacgtggttctagtataaaacttctctccgtaaacatatgccaaaataatagtaaatgaatcaaaccatatacaatcgttaactgtatttgcaagttctctactaacattgacataacagcaaagaaaacgaaaaggacaatggcagcaacagcgtaagaaatcatatataagtatttataacgatttttcaacgcataccataataaactaagtgtcaatactgtctcatatccaaagaaaatataaggattaggagtcgtactatttaacaagaatggtacgaagaacgctccgaccgctacgaaaatagtgagatattccgattgatatcttttcgctaaataaatacctaaaataacccatgcaatattacagagaaacgcgacacttgccggaataaatccatataaataatgtgctgcaaacgttgttagaacaatcccggtaatacttcctccagctaatactaaccctaacgcctgccgctctcttttaatttgaatatctcctatataatacaatccgatagataatacgataccaaacacaattcgtatcgctggtgttaataagccagcatctacccctgctttaaataaccagatcactccaagcaacataataccgacaaatacacgcggtaaccatgtttgacaaaacttaataatattaaatggctctggtttaaaagcagatatatctacttgttttacctgacgttcttgcaaaggctcttttatcttaactatttcttcttttggcttttcctccattaccgtttcaatatattctttcttgttcttactaacatgttgctgagcgttttctacttctatttccctttgctttacttttaattcagcaagtgcttcttgaattgtttcaattgccgtttcgagtgcttctattttcttatccaaatccttcttcatacgctccccctcattcgtaactctcattaaacctatatattaccaattatctttatcatactcttagtctattcattttcaatagtatttttccaaaaaaagaaaggcgtcttcccaaaataggaaaacacctttttactcatttattcttatttagaacaatgctaacgatgaaaccaagacacatgcctacaatagctggaacaatccacccaacaccttctgtataaaacggaatgtattttaatgctgacgtccactgattcatcattacatttttatttaaaatatcaattgcactaaatatcgctacaaccaaaacagttactgcatatacgtatgcatactttccaatatactgatggaataaccctagaataataagcgttaacgcaattggataaataaatccaagaattggtactgatacttttaaaatttgcgttaaccctaaattagctaaaatcatactaacaacgcttactataaatgcccacaatttataagatactttcggaaatgcactcgcaaaaaattgactacaagacgtaacaagtccaattgaaacacataaacacgcgatagtaaaaataagacctaataaaacgactccgccctgtccaaataatgtaatcataacttgtgctaacactttcgcaccgttatcaaatgttcctaatgagccactaattgcccccacatatccaaggatgacataaataatcgataataataatcctgccccaatgccagcaatactcatatatttcgctaaacctttatcatcttcaataccctttgcacgtaatgcatttgcaataacaattccaaagattaaagcagctaacgcatccattgttaaatatccatctaaaaacccttgaaacataggagcttgtccatagttccctattggttctttcatatctcctaccgttgtaaacatactctttataaaaatgagtgcaatcatacataataataacggcgtcaagacttttccaaacaaccccattaatttagatggggataaacttaaccagtaaacaatactaaagaaaataactgtgtaaaacaataataatccgtttcctgcttcagggaataactgacctggccccatttcaaaagctaaacttcccgcacgtggtataccaagcccaggtccaataaatacatacacgatacatggaaaaataattgcaaatgaagaatgaaccctacccgctaacgtttgaaaacttcctgcttttgcaatagagataacacctaatataggaagacctgttgctgatataataaaccctactaatgaaatccaaacatgttctcctgcttcatatccaaggaaaggtggaaatataagattccctgctccaaagaacatagagaataacataaggctaataagtaaaatttcttttttctctaacaatttcatttctttctccttctttaatttcatcttttatgaaatcaatttcacatataaaaagtacaataacccgcttccttacaaagaaaacatagtccatagtctatcacaaaagaaacacccattctatagctattcctcttttccaatttcttctgaaaaatcaacctttattgacttataatagttaataaggtaaaatattaaatgtacgaaattattaactttgtttttgtttgtgtcaggaggaaaataacatggaatcagcgatacaactagaaagagaacaacaaagaaaaaagaaacatcctccaggtttatacttactcttctttacagaaatgtgggaaagatttagttactatggattacgaggattattaacattatatttaacgacagctttagtaagcggtggtcttgggtttagtcccgcatgggcactctctatttacggattttatactggagcctgttatttcacaccaatgattggtggatacttaacagaccgttttctaggtagacgaaaagcaatcacaattggtggtataacaatggcaatcggtaaccttacactatttgccttgcaaaaccaattaggcctatacctcggattagcgcttattattataggtaacggattcttcaaaccgaacatctctacactggttggagaattatacgaagagaacgatccaaaacgtgatagtgcatttaccattttctatatgggtattaacgtcgggtcatttttagctccactcgtttgcggatttttatcagaaaatttattcaaaacaacagttgatggcgttgtacattacggattccgttacggtttcttagccgcttcaatcggaatgatcattggacaaattttatttacaacactatcaaatcgcttccttggtaatatcggtaaaaaaccaactcgcgatttacaaacagctgctggacaaccatcagtaggagatacaccgttaacaaaaaaagaaaaacaacgtaccgcagttatcgtcattttaacatgcttcgttgtcttcttctgggctggctttgaacaagctggtagctcattaacattatatacaaacaaatttgtagaccgctctgtgttcggatgggaagttccaacatcttggttccaatcggtcaatccattatttattattttacttgctccagtcatttctgcattatgggcaaaacttgcaactcgcaagcaaggtgatttaaaaatcccaactaaaatgggacttggtatgatcttactcggtatcggttatatcattctcgttatcgctacattaaaaacaggtagtgatgaacataacattacagaaaaagcaaacttactgtttatcgtctttacgtatcttttccatacgttaggtgagctattcttatcacctgtcggactatcaatggttagtgcgcttgctccggtaaaattagcatctttattaatgggtgtatggctagcaagttcaggtatcgccaacattttaggcggacaactcgcaagcttcacaacttcacttggatacgctgaagtattcacagttattggcgctgtggcaattgtattaggctgtgttttattattaatttctaagaaattagtgaaatggatggattaaaaaagatgaggaatttctcctcatcttttttatgctgttttacctttttctattgcttgttcgtacagctctttatgttctttatattcacttggtacgaaactcttatagaagaatgagaaccagctgtctccttttttatacccttcttctcgaatttccgctgcttttttattcgatttaaatccttcagtaaaccacttctttaacaattcatttcgttcatacttagcaggaacttttaaatcatagttttcaaatgcatacttatagccagccttttctactgccttttttgtagacttatagcctttttcatacgctgtttcatatgccttcacgtatacttctttctctctattttcaggattcttttcagctagttctttccctgtcttttcccctaattcagcttgctctttttcaattttttctgttctttctttattccctactttgaacccgtctgcaaagtttaccttaaactctggagcaacttgactatcgtccatcgtctcttgtgctaaaccttgttcttttcctttttcaaaatgcgttttcttctgctcttctaaagaccatgcggctgcataagtcgctttaaacgcttgtttatatgcatcagattttccagctacatgcacttctgcatcattttttcctgctttaaaatcagtttctccattcttttgaccttcaagttgacctttttccatatcagcttggcgctgcgcttcctcttgcttacgtgcctcttcagcttttctttgttcctcggctacacgttgtctctcttcttcagctttacgctgtgcttctgcagcacgttgtttttcagcctcagtattgcgctgtgcttctgcttgtctctcagcttctacagcactattattattctgactaggagctgggctcgttgcgccactactagaagctggtttattgtgataatgatattccccgtactgtaatccccacttctcacaatttgtacgacacgtatgtccgccattagcatctgtacgccctggatgcgcataagctgaaattggagctaccaataacgctatactcgttgttaaaagaagtttcttcacctgttgtctcactcttgttcctcccaaaatatagaattctaactttattatacataaatagaagaatacttaaatacgaaccgaaatattctattatttctcaacattagtaaaaaagaaggtgaactctttaaagagttcaccttcttttttacttcttcgccttcgttcctactaaatcaccagcaacaacataacgcttagaattatcctttacagatacacatgtaataagcgttatctcatctttcccatgatcctctacaacttcccacttatcaggagtcacttcagatacaccagtaaccgcatactcatattcattttcattgtcatacaaataaattttatcgccttttttcaaagaagctatatcactaaataaaacaccttttttagacatattatgtcctgctaatgcgtaatttccttttcccataacttgattctcttttactgtcgctgcacctgataataagtttttttcagtagaagcttttaaaacaggcagttctactgaaacacttggaatcgaaatacgaccaattacttgtttcttatctaatgatgcattcgctacttccgccaagtctggttgattaattttggaagcatctacaaattccgtctcatgcttttcataatccatcttttgaacagcctgcacattttcagtctgtttcttttcagcctgatatccatcataaaatggctttccaattaacacgccacctacaacaaatagcagaattgctactatactataaattctttgcttattcatacacagttcctttcccttacaaaatcttactctatataaaatgataaaataatatcgtcatatgtacaagtattagcttaaaaagaaaccttcttgccggtgcaagaaggtttctttttaagctaatttatttctgtatagtgatacgtgaaatactgtcatttgaataaagaaaatagaaaatagaatatataatgggtatccaggaagatattcattaataataggcgaaaaagttaaaaatccaactgcacaaggtaacacaaaccataacgatacaaatgttgttcggcaagctttatccgtaatcgctttttcacgttcatcttctagcggaaataataatggatacatccaaaaagataaattcttatattttttcttttgaattctataaaaaattgtaactataattgctccaataaataataaaatgaatggtactccattaaaccatacttcaaatgggaatttctcgtttttaattatatgtgctaactctgtaataacactataaaattcaacaaatgtccaacatgctagtgcagtatagagtacatttataatataagaaaaaacaattctattcatcctcttctccctccttatttaaaacaaacacatcttccatctttaactggaacacatcacaaatcgtaagtgctaataacaacgaaggaacgtaatcccctttttcaattgctgcaattgtttgtctcgttactccaaccttttctgctaatacgctttgcgtaaagttaaaacgagctcttaattcttttactctgtttaaaatggtcaaatttaccacctctcaccattattgtatgctattcttaacaaaatgtaaactcaacttaacattattattataaaaaaatccaactctacgtattgtaaagttggattacttgttagtttaaaattgtaactttaactgttcttctgccccagctacttgatgaacctttatctggcattaaaacatcaattctatgccctttaatagccccaccagtatcggctgcaattgctactccataaccttcaacatttacagtcttacctaatggaataacatttggatctacagcaattaatttcattcctgggtttgcagttagattataacctttaccacctggtccccatgcagaaaatacttgttgacctggtgcataaccattttcccctggatcagctgtataagctgtagcttctacataaatttctttcccaccagcagttggcttagaagatggttcaggttgtgcaggttctaccttcgaattattattagcaactggttcagctggtttactagctttttcctgcttttgcttttcagcaatttctgcttgtgctttcgctaaagcttcttgctctgcttttgcagctgcttctgcttttgcacgctcttccgctgcgattcttgctgcttcttgctcacgagcaatcgtttcttgtactgtcttcatatttgattcaattttagctttttcttccgctgctaaattaagttgacttgcaacttcattatatttagcttgaactgtttgtaagttatcttgacgctttttcaagttatcttgcagttcagcttgcgcttttgctaatttttgtttgtctactactaaagatgcttctttttcgtcaattgttttcttatcttcttcaatttgacgaagatcttgttcttgtagacgtaaaatttctttatcagcttctagaatagtagaaactgcgttcatacgttgtaagaagtctgcaaagttttttgattctactacaacttctactactaaacttgtatttgaactgttttgaacagaaaccatacgttttctcataatatctttacgagcaaggactttatcctccaaaacgacaatttcttgctttttttgctcaatctgcttatgtgtttcatcgattttacgttgaatagcagcttgatcctctttattttttgcaattgtattatttaaattatgtagttcgttttcgatacctttaatttctttactaacagcttgcttctcttgctctttcttttgcatttctgcatcgttttgttgcaattgctgttgcatgttgttaagtttctcgtcgtttgactctgctttaacagcgactgtactagaaagaccgataattcctgctaatactagacagctgattcgcttaaaatagttcataatccgactcccttcttatacagttatacatgatttattttacagtttgtttacaaaacgattaaatacagtttatttttcgtgacgaaaaaaagagaattatgaataaaatgtaatagattcttaaatatttaacaattcctatatttaaaaaatacaaaagatgctaaaatccaaatatagagaaaatataactttcgaaggcggttgaaataaatacatgtttactcaaaaaaaatcactccaacatacaattgctcaattacaagagcgtatacaagaattagaagcagaattaaaacaaaaagatatcgaaaagcaggagactatttctactatccacgatcgtgtacaaagcgttatccaagagcatcaacttgtaaataaccaacataatacacttcaaaatttagttcaacaattaagttcatgtttcgaaaatgtttcaacacgtacaacacattccaatgagttaaataatgaaatgttacaaaaggaacaaagcttaattcagtctattgcagaaattattgactgctctaatgaaggaaaagaatccgttcaccgcttacttattgtaattaataaattaggtgaacaatctcaacgcacgtctaatagtatgaatcatctaagcgaacgctcaaaggaaatcgagcaaattgtagaagtcattcaaaacattgcagcacaaacaaatttacttgcattaaatgcgagtattgaagccgcgcgtgctggagagcacggtaaaggattcgctgtcgttgccaatgaagtaagaaaactagcggaaagtacagcagaaagtacaaaaaacatcggcaacttaacgaaaaaaattcaagaagaaattgaaaaagcatatgataacacaaaagataatttacatttagtcgatgaaggtgtagaaatgagcgccgatacaaatgctagaattgaaaatattttagttatgattcaaacgttacaaaatggtgctacaaatgttattaaggctatcgaaaaccaaaagtcttgtaatgatgacatattacgagaatttgctaacacacaacaaatgttccaaaaattaaatactactattatgaatcatattcatgatgctgaaaaagtcgatgttcaattgtctaaaagtcttcaaggaacagtgacttcttaattaaaattaagaatcccttatactgctataagggatttttattttatttagaatatttatttcttttcaatattcatccatatctttgttatactggaaaagttgtttctttcaactaataaacaaggaggttattatggaacaattttactacgttttaaaatatttaattctcggtctgttccaaggattaacagaaccaattccgatttcttcaagtggtcatctcgttttagcacaacatttgctaggactaaaaatagaagggtttagcttcgaactacttgttaattcagcttcattattagctgtattacttatttatagaaatgatttaattcgtctaacgaagaatggtctctcttatatatttacaagagcagaagacgcaaaatcagatttcttctttattatttatcttgttattgcaaccattccagcaggtgttattggtgttttatttaaagattacatcgatcagtacttaaaaggtgtgaagatggttgggatttcccttcttattactgctgtcggcctttggattattagaaatttacgcggtcgtaaaaatgatggcgacctttctatgaaagatgcaatcatcgtcggattagcacaagcttgcgcactgattcccggaataagccgatctggtgccacaatcgtagcagcaatgttacttggtatgaagcaagaaacagctcttcgcttctcattcttactatacattcctgttagcttaggtggcttattgttaagcattacagacattgcaaatgatccaaatctagacacattattcgtaccatatgtcgttgcattcatcgcaacatttatcatgacgtatatttcactaaaatggtttatgaacattatggcaaaaggaaatttaaaatatttctctttctattgtattatcgtaggtgtacttactcttattttcttataaagtaaaacttacaaattaaaagcgagtcatctagtgtaatagaatgactcgcttttttatacctttattaagttaaaacctattatttacttataattttcagaatagtataatatttatcaagttcactattacagtaattctatctttcctactattatcgtaaaagaggtgtttatatgtttatagttactaaactcattcacattaagtacgaatatgaaaatgagctactttatgggcttaaacaatattatccttcccccggaacgaacggttgtattaacatagagttttcacctgttcatcgtacaaatgataaggcagagtatatgattcgtatgttatggaaaacacaacaagattaccatacatggctttctcaaaaagaaggcaatgaaactttgaagcacaaaatacaaggctatatcctttcttccaaatcaaatgctacctatgtgcattaatccttctctttttattccttacgagggccaaaatgataaagttaaattaatcagccctcatcaattgggctgttcacaaataacgagataaggaccctcttacttttcatactgtaagagggcttctcttatgcatacactttcttctcttgacaatacaaacgaataacatgtttattttgttgaaatacatcatgcgtcagccgaataataataaagtttcgttttgtttgatcatcatgaacaaaaatctgttctccctcctgaaaacgccatgcactttcaaaagtcgtaatatgatccccacttacagaaaaaagttcatatcgcatctcttgtaccctctctcaacttatataatcacaatatccttatattaaatttattataacttaatccctatcaaattagtaattttttctatttcgaaaggttttaactttgtatttaaatatttttagcgctataatgataaacgaatttttattgaaaggagttttactttgactgcatatttatttccagtgaaaacagcatttattttatttccttttttagcaatgtttcttttaatcccttttttaatatttaattatcgaaaatacggttatttaaataaatggcgctcatttattttatactcattattactttacttattaaatgcctattttcttgttattttgccgttgccacaaacgtttgatacttgtagcctacaaccggctaatacacaacacatgcaactcgcaccattttatttcatacaagagattagtagtcatacatcggcagttttaacgaaaccagctacttatttctacttattaaaagagtctgcgtttttacaagttgcctttaacgttctattaactgttccattcggtatttacttacgttattatttccgacgtagtttcttacaaacaatttgcatttcctttttcctttcactatttttcgagctaacacaagtgactggattatacggtatatacaattgtgcataccgattatttgatatcgatgatttgtttttaaatacattaggtggcgtaattggttttatcattgcaccaatatttacgtacttccttccgaagacaaacgagttagatagtcatattgatttggaaacgaaaccagtcggattcattcgtcgccttatcgcgatgcaaattgattggattttcttatctatcgtcgtacctgtcgttaaaaacaaaggaaattctttcttcgtttctaatatgcaatcttacaccaatatgtatgaactcattttcattacgtgttcaatccttatttactttattattattccatactttactaacggaaaaacaattgggaaagcattgcttcgcattcacgtgaaaggaaaatcaaatcgtattacattaaaagaactatttattcgttacggtatattttattttgcattaggtggaatcaattatattctttctagtagctctattttaaatcacacagagcctttagtattactcgttacattattattcctattcatcattaacggcctatttattattcatgttttactgcatgtatttagccgtgataaactactattttatgaacatattagtcatacaagaaatgcaattacactaaaaaaaggtgacaaataattatttgtcacctttttcatatacataatgtgaaactttaattagccctcaccaaccgggcggttatctcccaccgaattttgcgacgagagtgttactgcccgacaaatagcgggataaataacttttctgcataaggattaaaaaacattccaagttcatctagagatttcctcacctgtaaaaacgaatgaaattctggatatatatattgtaattgctcatatgataatgtatgcattttcccccaatgtggacgcccttcatactttagaaaaatcttttccacttcgccaaagtaagcagcatatttcatacctttatacatatgaacagcgatatatgctgaatctcttccataggccggactaagccatatatcatcccctttcacataacggcattcgattgggaagtgcaccttatactttttcttttcaataagatttgagatttcttctacaaccgtcctcatatactttgaaggaatgctatactccatttcataaaatggcaccgtacgtgatgtagcaaatacttcatagctcgggccaattatttttgtgtttggtacagctttagctgataaccgactcacgcctttacttatagaaggaaaccatttacatcctttagatagtaaagagaacatcctattttcaagtaactccacctttagtttatgccatttcaaatcactgcctttattcgttgtttcgttcgtaagtttcacttgtacttcatcagaataaggaaaaacgaaaaattcaaaatgacgatgcttcttatattcttctagtttgttcattacagtggataatgactgtttttcactttcataaacgagtgaatacgctggaataaccttcaattttatctttacaatgatacctaacattccaagtgacaactgaaacgctctccaatattctacgttctcagcttccgaacaaactatactctcaccattagatagaactgccgtaatctctataacttgtgttgataaactcccaaaggtaatacctgttccatgagtccccgtactaatcgctcctgcaatagattgcgaatcaatatcccctaaattttcttgcgcataacctttttcctcaagtaacttccctaaatcatataactttgttcctgcccatacttcagcaaccatcttctctgcatcaatattcacaatacccttcaattcatctaaagaaactaaaacttcttccgtttgcacaaggggggtaaacgagtgtcctgaaccgacaacacgaattttctttcccttttttcgcgcaagccccacaacttctactacatcttgtatactttctggatacatcgtataatgcggcgttccttctacattccctgtccaatttctccacttttgtccctttatagaaagcattggccatccccccgatatgttgaatactccccgacaatctctccttttttaacacgatacaaaaaaggaaagcgttcacataattcaccagccttactatgacgaaacaaaatggtctctcctatatccactcgttcctcgccgttataaaaaattggcgtttgtacctcgccagcaccttctaaagctaataattttgcacccttcggtctccaaacttcaggctctttatcttttccaactgctcctgaagcaatatatccaccacctaggcaagtgtaaataaacgggactggtttacgtacaactggtaaggcaaatccgaccgctggatgaaatttcacctctttataataatcaaacagcttcggagaataaaaagcagaacctattgtaatctctgaaactgaattatctttctcggttatttttatgcttcctgttccgcctccatttacaaaccttagctcaataccaatgttttgtattgcttttacaatatgttctcttctttctttaacttctagcactgatttctgctttaaatacgaaatcactttacttttcaaccattgattcggtatataatcgcccaccccggcaatttgagcttcatatcccattacaccatctaacattaaatatgatgaccttctcaccttttctactactttcaacgcatcctgcacattttttactggggacctttgtacaccaaaatgaaattgaaagaagcgactactcatatcaatatccaaacaaacacgaaaacatcctttagattgctcagcaatgttttctaaatacacaatatgctcttcacaatccaccatacaagttataatgaaacctttctttgttaacaaactaatttcatacagagctctttcatcgtaagcaggatatccaagcaataaatcattaaatccttgttctattaaaaataaaatctctctaggtgaaaagcacataataccttgaaatcgatcatttgcagctagtatcttttgcataatcggaacagagcgtaacgatttactcgctatacgaatctttttatttccacttaactctataatcgattgaatatttctatctaaagccacttcatccaaaaatgcacacggtaatggaacttctttaaaaattcctcgatccacatttttctctcctcttctcaatatgtcttatacatattggaaagaaagtgtgattttcctgtttgcaaataaaaaaagtttcttctttacgaagaaactttttgaaactacttcatagaaatagtcgcctctactggataatgatcagagtaatcattgatatataaaactttaatttccaaaaagcgcacaaaacatctatattaagcagttttacgctacatcaaaaaatataaatggcaacacttttctggttgtttgtgaccatattcgttaccgaaaaaatagaaattaaactaataaaaaaataaaagagcacagcgtgttaataaagtggtggaacactttattaaccgtccgcctaacgtaactaggcaaacacttgctgtaactctttatgtaccttattttatcgtacataagggttcctccgcaacagtttgcttacattttgtggcatactgttgcttttttacttttaaaggagacgagcccttatgaaaaagaaacaagcaattactattcttgctagtacagaaacatacgaaaacttagtatcttttcaaactctcaaggaattaaatgacactgtacgtgcatataaaaagcaatttgctgaccaattaaataaaaatcaattagctgtattaaataaattacacaattattcttctaaatttcttggtgtatctttcagaacgaaaaaacacattgccgaagatcttgatattagccgtagaactgttatccgtgcatgccactacttagaatcacttggcattattaagcaactggaaatgaaacgtaagagtgacatgagacaaacgagtaatataatcattattcagccaattattacggaagaacaacttgtcacagaagcccctactaaaactgtggaaatttgtcacaccaagaaaacaactacaaaaaccttaaaacaaaagataaaagatataaataaacgtaaagaagaagtttcgcaatcttttcaacatgatttagacttcatcgattatcgtgtgccacaatctatgcgtatggaattacaaactgctttttcacccaatgtgattaatgaatctttcaaaaatgccagaaacattgcaaagaaggctgcaaaacaatttaatttattagcagatacagatgtatttcacacccttcttgcaaatgcttcttctgttttgtactttaaaacacataagtacgagcataatggaaaatcgatgaaaaatcctattggatactttactcgaacgttcaaaaaaatcgtctataactacattgatagctttagagagatacataaccttgcaaatcgtaaggcaaataaatataatggactagcttttttcaaagaatttattgatggttaacttgttatgtcttaacaaccatttgattcatgaaatcgtgaatggatttagcttgaaatatgcgaaaatttgaagaggagatgtcatactggctatcggtaattaccagaagagaagggaagtatttcgatttcttgggttgccatggttcttgttgccattccaaactatgaaagtaaaattcatatcggtttaatttctcttgcattactttcttactgtataccgaattctgcacttctatgaaaaatggagattgtcgccaaattgcaaatatgtctggctccatatatgctttaccatacttcggctcgactttaaacaatttaggcttttcgtactgaagaagttgcttatatacattcacaatagcaaggaagtgcggaatcttttgacttgtttttcgaatcggactcggttgtggaaagtagatatatggtttctgtaacacatttacttccacactcccatctcgacttaatcgtttcataaccgtattgcaactggtcacagctttcttgagtccttggaaatgcaaatcgataatatcatctcgtgataggcatctaaagcggcataagtcttttataatcgctttatctctactcttcatgttccaacactccaaacaaaggaagttcttgttgtagcgaattctgaaacgttatatcttctttgagtaaacggtaaggttcaactatttgctttgctttattaagttctaaataaggagcttgcactttctttaatccatttaactttaaaatcatttggccagattgttctaagtgttctgatccagatgtacccataatattactattaattgtgttatcgcatttaaagcccattctaaccgtcatatttagctttaacttaccatctaacacctttgcatctggtctttgcatagatagcatgaggaatacgcctagtgcccgaccaactgccgatattttttctattgtcgtcatacattctttttcatcttgtagcatcgctacttcatcaatagctaacagaatatagggtttctgtttatcaggatttaatttattgtactcatcaatgtgatccacttcatattcttccatgagctttctgcgttccctgatttcattccaaaccttatgaagcatgactttcatttcaatttcttccatgcacacttctttcacatgttttactctacgcaagaaatgaaattcagaatttttcaagtcgcctaggtacaaatataatttatcaggagacacgcattgaatgagtgtagatagtacaacacgtaccatgctactttttccgctacctgtttctcctgcaatgagtaaatggggtgtattggggtttaccatatcataaacaagcatgtttccaaactggtcacgccctactacaataggaagacggcattcttttatgaatggctgccattgcttataactgtagttgtattgtttcaaaccacaatcagaatgaaatacattgagcacaaactttttaatatctccctcaattgctacattccgtccaaatatttgttgaaagcaaaaccatttcttttcaattgtctttggatctaatccgttggggatagtaaatacatatttcacgctttcgtttgaagaaaaaacagcatgaacctttggataaattgggattttccctccacgtgtttgatgttccgtatataaacctgccttttggaacacctcaataatctggtgctttaaagacctcttatgaagccattcttttatgattcccatgacaagcctcctagaacataattacaattcgaacaaatacataggtaatgaatcccactccaccaattttcacgccataatgaatcccattggataataatttagccgctgatacataatcatttcgtacaagatatctttctaacatgactgccccagttaaagccgttcccattatccctaatgccagatacgtatttaaaatagaatccgacatatgaacaaatgctaacggacttaatgaatgatatctttgtattttctgctctttcattttgtatgatccatccataaatgaacgaaaagggatgacttgctttcttgtaaacatagactccactcctcgtcatttattttttatcgtattccgcacaagactctgagcaatacttttttccattccatctccaaaacaaccaatcggataataaacatttacaatactcacaaatttcttctgatgctgccatcttgatgttcatttctttcgcccctctataaacagaatataaaatctagataaagtaacgcttcacacactcattaccatggtagcgttaccttgataggaaccctggtagctaccgtggtagaaatctaaaacttaccatgatacctaccatggtaaaatcatctgttcctaccttgatagctactttggtaactggaacttctcttaccgtggtaactaccttggtacatcatattagggtgggctcggacaatttctcaaaattttttctaagtttaaaaatttgaggaattggtcattctgttgatgaggtgagtttaaatgttcggtttaggaaaaaagcgtagtaaattcgggaaatggttagataggcagggaattcaacaaattgaacttgaaaaaaaatcaaaattaagtacaggcactatatctagattatgtagtgatacaaaatacaaacccaaatactctacaatatctcaaattgttagaggtttgaagaagttaggaaaaaatatagatgaaaatgatttctggatgtaattagaaaaagaatcttacaattttcttcttaaattggtatgatttaattaatttaagggggcggttttatggagttacgaaaaacagctgatggggaatcattcattattgaattagaagaaaagaaaagttctacagctaatcagttgaagagagttatatattttttaattggatctttcggtttattaatttcagtagtgttatgctttaccataattggaattttaccaggtttaggtttaacattcttttctgcgctctttatatattcagctttaggtaagcaacttgtaaaatgcccaaactgcaacaaaaaacaacctgttgtacataaagctgagggatttgtttgtcgtagatgtaacaaacgtactcttgttgaatggaagaaataaaagggccgtcgtttgacggctctaatttttgttcataaaactattcttttgtataaaagtatttaagtcctttagcatctaaccacgctgttgctttatctagctcgctaccttgacgataatccgactcaaaataaacaagcccctgacgatctccacgagaaacaatttttgaagtgtatccaagcgtatccatcatttgaatcatttctggaattaaatttacaccaaattcataagtaatcaccttattatgtttgttcacgataatctccactccttcttgtttatacgatttatttgtaaaccaatctaacgacttgcttccaattaatttgtttaaatcacactttccgataccaggaacacttcctgtttcagtgtattgccaaatatcacatggataagctggtctattcccgccatatcgaggaatccatacaaagtcagattttacatttgccattccgaatggagcatacatatgatggccaacatataaaccgactttttgagcacctaatcggcgtagttcatcgataaacgcttgcgtgccggctctcatatcatccattgtttttacttccacatcagccacccagactgttgcactcttgtctccacgattccagaagtctcgagcttctacacgtgcgtcattctcagaaacgaaacgacaaaatgcatagttaccaaaaggaataccatgttgcttcatagcttgtacataccccttatataatggatctacataattcgaaccatcttgtacacgagcgataatgaaatcaatgtattgttttgccacgggccaattaatatcaccattccattttgaaatatctacagtgtaacccattatttatcctctccttcgctatttacatcatgatcagaccaaatccccaatgcgatacctactgtcaacaaataaggtgctaattcatccaaaaagctcttagcttctggcacaccaaatttcgtaaataaaaatccaagcaaagaaaaaaccgcaacccatgttttccagttgcggaatcgttttttgatattttcttttgattgattcataactaatctatctccttttctacattatctaagcgcttatgcgcttgtttggcactctcttcaacccttgtaatacgctctccaagtacaatcatttgcttttcatttgcctttaaatcaatccgaatatcatcaactcctttactgatgtactccaatttcgcgtttgtttctgccccttgtctaccatctgacttaatctctttcgagcgattcagtgaataagacatatatcctatcaatgctgacgcgattgcgataagtactcctacttcaattgtcatttcttcactccttttatgctgcaaagtaacttggatccattccaaatatttctgcaatatcttcttcgcttctatcttttagataagactccgtagttgagatgtcagaatgattggcgagtgattttagtttttcaagtggtacgccttgtactttcaagttatctaatctgctatgtcgaaaacagtgaggattcattttaaattccttcccttccttttcgttcagcatcttagcaaatatgtcgcaccaataattaaatacactcttgttcaatctttttctctcaccattcttataaacacgtacaaacaaatctggaatagtatccttacctcgctgttttatatataaacgaatacatttctgcacccggtgattgtaatataatctaaacttcttaccgcgttttcctcgtaccacatttgtataatattgttctgttaacccttctttttgaacctggtaaacctcattctttctagctgcgctgtaataagaaagcgctaaatacgtagctaacatgtatttttctttttcaagtaattcatcaattaaccaattaatttggtcctcagtaataaatgtaatttctctaattgggttcttaggtaaaccacgcacccttgaacctacattaaactcgtaattataatcatcatcgtctgcacaaaattctagagctgaacgcaatgcacttatcaatccattcacccgagcattagacattcccatctcctgaaaaataatagataaatttcggatgtctttacgtgttaaatcaatcaaatttttattttcgaagtgctgatgtattagaaataaaataattcgcaaatcccaattgtattgctgtaaagtgcttgccgctttcccttgtgctttcttttcaatgagaaaatctttaactagatttttattttcttggctaacatgcttttcataaattgcttggtctactattcgtttcacactgatcatctcctcaaaagtaaaaagagaagtgaaatcactcctcttgattgatgaattgaatcaaagccctatcttgtacaaaataaaaacagcttatggctgctttggttcctcatttattaattgttgtactaatacctttaattcataaatttcagctttcattgaaactttctcaagtttttctgcttcaagttgttctttaagagtatcaacttcctgcttcaacataccgtggtcaaattgaagatttttaactttaaagtcaacttcttgtattgattgaatagaaattgcaaccgagctataaagtgttacagcgtctttctgtggtgtggtgaatacatcgtcagagtttgtgtatccaatatcactagcgcataagaggaaatcgattactgcatcgttcacattttttttatcaactatcttttttaatctttctatattctttttacccgtctctaacaaaattcctaaagaaattatccaaagcatatatatataacccactttgctagtccctgtatgctctaaatcatctatcgcattataaaaatatacttccattttactaatgtcttctcctaaagaatacattgccctaatatcgttcatctcatgtataaaattcgacaaataattttctaatataatacttttgttatcattaggatatctttgaataccatttttttcatcttcttctaaacttttaatctcttctctattttcttcgataaactctttatgatattctattccccttttacatttttcttctatacataaatgatctctcattctttttaattcctcctcgcttctagattatggccactctccaacgatgttaccctttgcatctatcttaaatgttttaacctttccactactatcaacttttgataatactctttcaactttacctctttgcaaggctttcgtaatctgttcagctaatacttaatctccctcaacagcttttaatattctactttttccagtttcagaacctttcaaccaatcatttgacatttgtcgtccatctttagttttccccaattgtgaactaccaaacttagcttcatctataacgtatttgatctttgattctgcatttgcattttcgtataatccatcaattccttttactattttatcatttatgcctgatggtgcactttttccgactggctttaaatcaaatccagcttcttttaaactttgattattcaataaattgtcactagattttatttcaccataattccctttttttctttttttcataatatttttcttggcttctacaacttttaattgatgttcatttaagtttctagcaacataatgctctctgctactttatcaacttgaaccataccctaaataaaaagcacttgttgcctttagtcgacaatcaagtgctataagtacatatttctgttacaagcgtaattaaatattttttgattattttaacaataattatctctttgtactaatattattttttcgcatagagaatttattcatttttaaaatgaaccatgtcataaggataataagaaatatcttttaatatactatcatctaatcctaaaattttcataattgctccactttcaaaactccaataaccaaaatataatttttcttaatgtttatggcattcataccataccatattattatgcccaacataccattgccctaacaagtattttttcatgaattcacaagattttgtattatcattacacaaaataacattaatcagacttttaaatggcttttcaaataaccagctatattttcgaactgtaatcacttcttaacaactactaatctacctctattatttgtatcccttctttggtttctggacaatcattaatgcttctttttaatactcatcttcaaataaacaattatatatagtaacacctgtttcctttaactctaacgaaacatcctccacttcaatacttaacgtttctttatcaagattctttattccgttactatctaataattttaaaatactacttcctattttcttagattcatcattgtatggcgaggactcttcaactagctcgattgtaccattagtgtatctatatcttaaatatttaaccactgcatatggcgcgattgccgaaatcattagcattacacaattaatttctgattgcttccgaacatactcactgaattctacactaccaaaacgaaatttcacatctagtggtagaagaatgtaagaaaaacatgatgaataactaaaatcagtaatattatcaacgtttatatttgatattttattaatttctccatcccagaaatgtttatcaacaaatttccccaaaacatattggaaatcaccttgtttatataatttattaacaacttttagtatctcatcactcataattattctcctttattgtacagggtatccatgtatatttcctttaccatccatatgaacctttaccctcgtttctccatttggacctattggttttccaaaatcatgtactctaacacttccatctggctttactggtgttcctttcacccatgcttcttgtgtctctactactccattcttccctgctccccactgcgatttggttgagacattattcccatgaccaggaacatgtttaccttgttttcctgcatcaacttttggagcccctgaaacgccagcatcaacatgtccttgacttgctagtttatcattttttccaatgttccctgctacactggctccctggccaccatcaccagtacccttacctccaccagaagactcgattctttgaagagtatccttagcattttgaatcgatttatcccatacaaatccaccatgtacaaaaagacttgccccagtagctgttgctgctatatctaatggaataacaattggtgacgctaatccgccagttcctacttctgcgacgatcgttaagaaattagatccgcctatgagcgaaatagcttcaaacatttctacaatggacccggctattgatataacatttccagccaaccttccagcttggtaagttgtcttactttctaatttatcattctcatgtggttgtagtccaaaaaagttttctagtgctgcatcaccagcaccttgaaaaaattcgataactccatgcaaaaatgtttgcgcataaatggctgttttttcatgccatgatctattgtcttcctgttcttgtaagttcatttcttgtttgtgcaaagtaatttctttcatctcgttttttcgagctgtttcttctataatcccctgaatcgaactcacccaatccatattcaacccttgtgtactaaacgtcccactcacaggactaaatcctttcccgctttgcacttcagcgagtccggctgtgatgctagccgctaattggagggcggtgctgtagttgttgctggatgaatgttcgaattcttgtaaacgctctagtttttcttccagtttttttctcattgcacctaataccgttacaatcgcacttactccgggcatcggtgtaagtacttctattgcttctatacttgtaatcgattgattaattccccgtatttgttctcttatttcttgttcgatcacatctgtcgaagcaactttcgcttggaactcgtttggaaatgcttcgttttggcgaattaattcttcacataagcatatgattccttgcgctaatggccgaaatgtttggacaaggtaggcttttgcactactgtatgtttgtccttgtaatactgtgtctatcgcaaaggcatcaatagattgaatggcttgttccatactttgaatcgtagcattacatatagcgttcatactttgagtttgactttgtacttctcccaaatacatgtttaaactcatgtattggcctccctttgtagttgctgctgttcataggaaaggtcgttttctttctcactgagatgccgtttttctttaagcaacgtctctttttcattttctaattcgaatgtaagttttctttcatactgtccgatttcttgccgcatattcgtaaaaaggtgaaacacttctttgtcgccgtgccaagtttctagtattcggttaaataaacgattacttctatttttccattcatgaaaactaacctcagctcgttcttgattttgcagcgcaattcggttttcattttgttcttcaaatataattcgtaatttttgattacattgactgattctcgtttcaatttcttgactcatcttttctccctaccttttcccctttacgtaggttgttacattattgaaaagtcttttgaagtcctgtatccattttctcaaattcatttgctacggaatggatattatcaattgtttgttgaaaagcagtacaaaattgtttcgtgatctgtaaattttgttgatttgcctcttgtgcttggaagttcacagatagtgtcgtacgcgttgccttatttatagagcgactagtagcactttgcattctatctgaagcatttctcattttcgttgcaagttgcgttgccgtatgcaaattactttgaaattctcccattacttactcccctctaccttttatttacaagaaaattataccacggaaaaatatcccaataaaccgaatgttcgaatttaacatacaattcagcactcttactgaggatgcgagcaacgcttatctatcaacataactgagtccaaaatggattctacttatacaaaaaagatgacttcagccatatgctaaagtcatctttttctaccttattattttactaattctccattataagcttttatattaagcggagcagttaaaaattgtgctgctttactaacgaaagatgtgaagtgttcactcgtattatggctcgcaactgctgcttcatctttccatacttctaccatcgtataaacactttctttttctgtatctttatataaatcataagatacatttccactttcttctcttgaaccgtgaatgagtggctgaatttcttctaaaaatgattgttgttttgctgggtctacttgaaatattgcgtgaataataatcatggtgtttcccctttcatattccatatatttctatgacctaattagattacttccactcagcaactttgtcaattggaagacgtactgattggtaaccactatcagcagcttttccgattgaaattaacattactggtacgtaacgttctttatctagtccaaatgcttctgcgatttggtctttttcaaatccaccaattggacaagtatcgtaaccgtgagcacgagctgctagcataaattgcattgctacaagaccaccgtcaattagcactgtatctttcatgacttctggtgtaaccattgagaagtaagctgaaagttttttcatttgatcttcttttacttctgctggcattaaaccgcgttctactgctgtaccgtaaatttcttctgcgttatcaaagttatttaaatcaccaaataaagcgatcatcgctgaagatgtttctacttgtgattggttgaatttcgcaagtggcgcaagtgttgctttcgcttcgtcactttcaattactaaaaatctccatggttgcatgtttactgaagatggtgcaagtgttgcttctgtaagaatttctgtcatttcttctttgctaattttcactgaagggtcgtacttacgaattgaacgacgtcctgttaaaatttcgttaaaatcatttgtttttactgagttagtcatagttgtattctcccttttttataattcttttatattttcttgaatgtgatttaacatatttaaaagattatcgcgttcttcctcacttaatcctttaaatgcagatgctgcaaaacgttctttttcctcttgaaatgcttgaattttatttcgtccctcttcagtaagagaaactaacgtaattctgttatcatctggatttttacgtcttacaatcatttcattggcctcaagctgctttaaatgccttgttatcgcagcattatcaatattcacttcttgttgaagtgctttttgactaatttcacctacttcatataactgaagtataagctctaatcgagactggctcatacccgtacacccttcaaatttcgaacttacttctttatttagaaagtgtaatttatataaaataatcgcttcttttgagcatgaacttgtcaaattaaccctcctttacaatcaaaataaaaacatttgatgtatcaatagttgatatgtcaattaatataatctatatcgatttagaatgcaagcattttgttttcattttatttttttcaaattaaggcgctttgtagcgttacaaataatgttaattgcactataataatactaatttaaagaactggagagtgattgataatgcggcaatatacaaatagaaatgaggaattgaaaatggaaaatgaaatgaggatattcacaaatgacaacaataaatatagggattgtcgcgcacgtagacgctggcaagacgagtttgactgagcgtattctttatgaaacgaatgtgattaaagaaattggccgagtagatagtggtaatacacaaactgactcaatggaattagaaagacaacgcggaattacgattaaagcatctgtcgtttctttctttattgatgctgtaaaagtaaatgtcattgatacacctggacacgctgattttatcgctgaagtggagcgatcattccgcgttctagacggtgcgattttagttatctctgccgttgaaggtgtgcaagcacaaacaaaaattttaatgcgaacattacagaaactaaacataccgactattttattcgttaataaaattgatcgtagtggcgcaaacactgaaaaagttatgaaacaaataaaagaggttctttcaaatgaagcattccccttctactctgttctaaacgaaggaacgaaagaagcccggatcattgaatacaaatcatatgacgattgtatggaactgttagcaccatttaatgaatcgttacttgaatcatatgtaaataacgaaataataccggacgcactattaagagaaaaactagaacagcaaatacagcaagcgaatgtgtatccaatctttttcggttcagcaatgactggtatgagcgtaacagaacttcttgaaaaacttccggctctcattccaactcttacatcggcacaagaggaaccattatccggtgttgtttttaaaattgaacgtgaaccttctggagaaaaggttgcttatataagagttttttcaggtagcttacatgttagaaaatatgttaatatacagcgcagtaagtctctattccataaagaaaagataaaaaaaatgtgcctatttcataatggagataccgttcaaacttctaccgttcctagcggtgagttttgtaaagtgtgggggctgaatgatattaaaattggtgatattatcggtgaacgtacggattatataaaagatattcactttgccgaaccacaaatggaagctgccattgatgcggtacctaaagagcaaattcataatttatacgctgttcttatggaactctgtgaagaagatccgctcattaaagtttggaaagacgatgttcataatgaactatatattcgccttttcggtgaggtacaaaaagaagtaattgaaacaacactttatgagaaatataatttgcaggttaatttttcaaatacgcgagttgtatgtatcgagaaaccaattggcgtaggcaattctgttgaagtaatgggtgaaaaagagaatccattttacgcaacaatcggattcaaagttgaacgtggtgaacttaattgcggtataacatataaattaggtgttgagctcggctcactacctttagcatttcataaagcgattgaagatacggtatttcaaacgttaaaacaaggattatatgggtgggaagttacagatattatcgtcacgttaacacatactggttatgctagtcctgttacaacagcgagtgactttagaaacttaacaccgctcgttttaatggatgctttaaaacaagctgcaacatatgtatatgaaccagttaatgcgtttgaattaactgtaccggagcaagcaattagtaccgcaatgtataagctcgctgccgttccagcaacttttgcagagcctatattcaataacaattcttatcagttaacaggatcattacctgttgcgaaaacagagagtttcaaacgaatactacattcatttacagaaggagaaggcatatttacaacgaagccagctggtttcacaaaacttatggctcccttccctactcgaaaacgtgttgattataatccgctgaatcgtaaggattatttacttcatgttttgaaggcttattaaagtaaaagaggtgcaattcgcacctcttttgcatgtattaataggttagtttgtcctaacaacttctttaagttttcctattattttcgctatagcctcaattgaattttccgtttcatatcccccaacatttacagaatgatttgcatttttgacaacttcaatctgtaaattcgttttatataactgatcaatttgatctgcattgtattggtgatctttatccccaataactaaaaacccttcgtgtcgactatgtaagataaaatcaaaaattgtatcaaacgtcagtaaaggtgtaagtagtatcatttttgactgcgcgaattcttctctcttcattaaatcatttgcaatcggaattgttccgaatgacttccctaaaaacatagtctcgttgtattgctcatcttttaatacttcatttattacaggattaatatcatccatcattactttcgttacttcttccattggtttattcattaattgtccatcataagaataatgaatatgtacaacatctattttatgttcaagcattaacatcgttgcgtaataaaataacggcttatcataattgtatcctgaacctgaaaacataaaacaaaccgtactagaacctttttcgatatgtgtgtaacgaattactttgtcatttatatgtacctcttttttagtccccttcaccgttttctcctccgaatacgtttacttttgtaatacgatatgttctgtgtgaactgatacatcctttactttctcttttataaatgcaggctgtaagttatatgtatgcagttcttctactggcacccatctaaacaaatacgttctaccctcttcttccaaaatatattgatccgctccactcgcaggtaactcatgtagctctacttcataataaaaactaatttcatgaaactttcgctcagaaagtgtaaagaaattttctactgaccatattaaccttttccttttaataggaacacctatctcttccgcaagctctcgttttaatgcatcttcactattctctagcatttttactctaccgccgggtacatacaaaaaatcttcaccgtcaccttgcagaatgagtattttattatcatgtttacaaattgctccaacgcggtaattaaaacatgtttcctcaactttaaatgtaagatccatccgtaacgcccccttatataaatatcgaattattacaaaacaattatgtaattactgtacaaataaggttactaaatttatccactccattcaatgatttttgaattttctaaactattatttttcatcattacaagtgtatatgcatatgttacaatcatattgcacactagaaaacattatgggggtacggatggaaacgttattaatccagcaaactgagaaatcaaataagttttggaaaatcgttgtgaaagaaaaagactatgttgtgttttacggaaaaattggcacagctggcagtgtgaaagcgaaagagtttgaaacagaagaagaatgtatgaaagaagctaataaactagttgcttccaaacgtaaaaaaggatatacagacccgttgcctggggaagattacataaaagaaaaaacgataacagaagaagaattttgggaactacttaatcgtgcaaaaacgaaaggtgaagaccaagaagaacaaatagaatggcttacttcccaccttgctaaacgtacagtacatgaaattgtagcttttgatacgcatatgcatcgtcttttgaaagattcctatacctcccgtttatgggcagcagcctatattattatgggtggctgttcagatgatactttcgattacttccgcggatggttattatatcaaggaaaagagacatacgaagcttgtattgaagatccagaacgattaattcctgtattagaaaatttgagtgagtatgacgtcccagaaatagaagaactttctttatatttcggtttcactgtatatgcagaaaaaactggtgacgaagatgatacttactttacactttaccatgtcttatctaatgaagaattcgacgatgtagattttgaatttgactggaatgaagacgatgaagaaggtttaaaaaagatgtttcctaagctatgggaactgtatggagaagaaccgtttgagtggtagattcattattcgtgaaaaagtgccttgtttctttagtaacaaggcactttttttgatactatatttaaattatcatctttccactctcccaccactccataaaagtctttaaagaaagagcaacccacgttctactatcattttcatggttccatacatatatatcatctctttgtacttttccattcaaaatggaatagccaaacaaatcaccatttcccccatcagcaaaaaataataaacagtcaaaaggcatgtataaatccttaaaatcaactatatttctcatactcatattttcagttttaatttttgaagcagaccatataaagtcaccgtattcaccttctataccgtttgtttcctgtaataattgatataaatcattcggtaactccacatgtaaacatttttgtatatcagtaagttcatccttcgtagctgggtttttcaagcttaaatttgatgagatactgtgaatggtgtctttccacatcaccttttcctccttatgtgcaatcaagcatactcaaagaactccgctaaatttattgataccatctttctaacaattccttctccctctcgcctgaaatacctgcttttaattcccattcttccgtactctccatccactcatacacatctgtaactgtctcgtctattcttctaaaagtaagcccttcattaaccgcactttcgatacaaatagaaaacccgcctctccacggcttcgtctcaccatctaatgggaaagtttctggaatccacaaaggcatttctgtccaaggctgcacattgtgttcactcataaacgattcgtctacccaaacaaattcagcatcgctattcgtaacttttttacacgtatttaacagctcttccatcgtcaattcatcattcggacctgttatattgaatgtacctgctttattattttctgccatgttgagtccaaatctcgcgacatcttttatatcaactatctgcactggacgattttttcttcctggaactaacacgttacctccttttgctacacgctgaatccagtatggaagtcgatctgtataatcgaacattcctgaaagaagtcctgctcttacgtgtaaaacacgccccggccaatacttctctgcttctttttcgcataatactttcagcgcaccataatgctcataaggagatatttcaccattctctacagcctttatttgctcttccgtcggttcaggttgtaatatatagtcttcttttatgtcatgcggaatccaatctttatatacggaaaggcttgagatgaatatatagtgttcaatattatctttaagcacttctccaacattcctaatatgatgtggagaaaatccacatgtgtctatgacaacatcccacgttcgattttttaaacttgatacatcgttatttctgtcaccggttaactgctccacattagaaaaaatttctttgtttgttcctcggttaaataacgtaatttcatgccctctctgtaaagcctcatctacaaatgctcttcctaaaaatcgtgtaccgcctagaattagaattttcatggttctcccccattcgtgattaataacccttcctaatgtttaacgattttttattgaggaaagttacggggagcgtttaaatttttctacaagttcaccattactcttttaaaagtatatactctttgattaatctccatctatcctttatttctggcacaacttcagaagccatcaccaccaccaattccttctctggaatacaacaaatcatattcccaccatcacccattgcacaatacgaatagacaccctcttcttctcgtaaccaccataagtaaccatattgatttgaattcatcgctattgattcttttatccatgattttgatagtatttgttttccattatgaataccttcattcaaatacagctgtccaaacttagctatatccctaaccgttaacgttagtccccagccgcccgtcgaaataccgtttggatcgtgaacccatcctttcacatcttttccgaataagtcatcgaatccaaatgctttcatattgtagtttggaatttcgctcatgccgagtggttgaaataagtactcattcgcaaattcacgtgcacttttccctgttgcattcgtaatcattgctgatagtacatgcgctcctgcagatgaatatttaaaagctccaatctctccaccgttccccattctatgaagtgtatactgtacccagtctggttgtgtacataattcttctaacggttcctgccagtctacaaaagggtatggagctgtcattgtaagtaggtgtcgcactgttacttcagatgactttactttatattcagggaaaaactctattactttttgatcaacactttttatatagcccttatctatacatattccaattagcgcagagattatcgtttttgtaactgacgctacatgaaatgtatcattttgtccgtaatcgttataatatttttcaaaaataacattacctttccgcactactaacataccattcatattttcatattcttcttttataatctgatctaacttttcagcagttttcattattctttcccctttaacctatgattaaaaaggttcgataggtacatatatatcaactatatgtttatgctttggatgctgctttggattatttctatatacttcaaaaggatacgagtctctcggtttatatccgctatttggcagccattcaccgtataagaaatcccatgctcctttatattcatcttggaatatttcaaaatgtcctactgcatattttccagaaggtattaccattattccaacgtcgttcgtttctactgtggattcatctgaaattgttacacatagacttgttcttaaatgatagtcctcagtaaattcatgatgatcgtggtaaatggttaatactttcgtatcctcaaatacatgatagtttttcttcgccgcgtaacgaaataatttttctatcatttctggaaaagctatagctaactctttatatgtacctgtatgtcttatgtatgcgacgtttatatcgtccgctgttacaatttcaacatttcctcgaaccttcttacattcattgtattgaggaattccccttacgtctttgcaattcttgctattatcgtttcgatattgagacggacttacaccgtaatgacttttaaatgttcgggaaaaaactgctgaatctgtgaatccgaagtgatacgcaatatctgtaatcgtcatgtctgcgcgatatgtaagtagatgtgttgccctttctagtttcaagcgattcacataccgagataatggctcatcaactattcctttaaaaatccgatgaaaatgatacttcgaaaatcctgctatatcagctagctcttcaatggataatgaactgtctatgtttgattctatataatcttgaaccttatgtatgcgtcttacatactcatttctactctgtttattctccatactctttatctcctcacaacaaaaagaaccatcctagaatacttttaggacggctttctattcgtaatagattcttccatattctattgttaaatcgatataatttcactatattttttaaattgatggtaatgtggcagtatcccgatttaattgaaagaaacaactatttttttatagccctacgcaaattaataatattattgggatttagctcccattgtctcataagttctttttgtcttgtttttaagtcttcaaatggttcttccactatgtcgattttattaaatttcccttcgaaaactaaagcattttttatctttttatatccaccaaaacctaagtcatcatttagtaaccagactactctctgtatttttgcgaataaaataccacctgtacacattggacacggttccaacgtgctataaatagtaaacttctcattttttatttttgcatcaaacattgcttcccctgcattgcgaatagcgtctatctctgcgtgagctgttatgtctttttgtggatgcactctatttcttcctcttgcaatgacattattatttccatcaacaataactgctcctactggatatgtgttttcttttaatgccttttctgcttcttccaatgccatctccaaaaaatatctatctctttcaaaatgcatataaatccccttcttttgatgaaattattttatagaaattgcttttgacatcccactcacttctatcaaattaacaaaataaaaaaagatatcattatgtctgcaacaacagggcaagaatggtgttttgatataaacttaatttaatagaatttgtgatacaatccaatcgccattaagctaagaaaaacaaataccctaaaacgagaaattttaagggatcataaaattttcaaatttttaattcttgttttgacgtttcttttgtatgctccctataaccccaaatacaatcgctactgctaaacatacgattgagaaagtttgtaatacgtttgtcgaaaaatagcctacccctaacactactgctaaaacgattcctgctactaacattctccgttgctgcatatccatgcaatcattccccttttatctacacatgtttcaaaaataaaactctactcccgccattcccatcataatttgtatgtaccgatacaccctctacctcatcatccccagcctcaattcgaaaaccgatttcttgatgaaactgtatcgactttttattagttggtgacgtaattgcttttacaactttacgattatttgcacgagcgacatcaaagaaataagaatacaatgtcgatgcgattcctcttcttctatacttcggatttacaccgataaaatgaacgtatgcttcatctttatatgtttgtgaaaaaaatccgcataagaaacctaacgtttcaccctcttcttcaatgataaaactcgtttcttgaaagtgaacaaaaaacagttttggcaacatggcaaccatgtctctcccgccccaccaatcatttaaaactgaatgaatctttacataatcttccccttggatatttcttactcgcatatgtttctccctctcactcacttcattttttcataaattttaatgactgtttctactaataggatgaatacccatatcccgcaaaatacaagaacagactggaatatagatccaattatcataacaccaactgtacctgttattgaaaaagatattccaccaagccctggatcttgtataaatgctccagcagaaaaagcagttataattgatactattaaataaataacactcgttatttttaatatctttatagaaagatacgaggttttttcttgttccacttgtgataattcgatttccccgctctcaattcctttttgcaaacagtcttcacatagaaattcttccttaatttttttaccaccgtgcatcgtacctgttatttctttacatcttgaacattttcgatttatcatgttgttatcactccaatctgttaagattatacttatacaattctacgtttaccttaatattccttttatgtattttatagagaaaggtcgtgttttatgatttcaaaactcacatttggctctaaaaaaattaacgttcattatacattaaggcctagttgttatgcgattatttttcaatcatcttcttcaaagattgctgttatccaaaaaggagaccgttactttttacctggtggcggtatggaaggtaatgaaacaaaagaagaatgtttgcaccgtgaactactagaggaattaggatgggcaattaaaattgatcagtatatcggtaatgcggctcgatatttttatgcagaaaaggaagatatatattatttaaacgatggatttttttatattgcgaatatggtgcagaaacaaactgaaaactgtgaggaggatcatgttctaaggtggatgtctccattgcatgctatagagcttctcatacacgatcatcaaaaatgggccgttgaacaagcgcttttattacaaaaacaaaaaggatctccttctatatgaaagagatcctttttactgttaacttacttttttcaaattgagagcaggctttttcattccacctttttttacaacatataagccgataaaaataataagtccgccaacgagttgcatcaaattaatttgctctccaatggttactgccgcaaagatcactgcaaacaatggcacaagatacatataaaccattactttcgttgagcctattttactaataccgacataccacattgcaagtccgaagatggtcgcaaagatgattgaatatgcaagcgatccccagcttggcgtatctactggccacgttaaagaatttacgttgaataaacagtatataactagcggtacaattccaattaaagtagaccatgatgtgactctcattgcggagtattttgtaataagaggttgcgctaatattggataccatccccacgcaattgctgcgactaatccaattacatttccgagccacgcatactcgtaagtagctcctcctgtatgtcctgttaataaaacgaatgctgcaccaataaaggctacgattgaaccaatttgtactttcatcgaaaaacgttcttgtttgtgcaatactgctaatatccctgtaaaaataggtgacattgcaattaataatgaagcgttcgttgctgaagtatatttcacagatagcataaacatcgtttgatacattgtcgttccaacgatgccgactgctactaatcgtaaccaatcttttctttcaatacgtaatgagcgttccatcataaaagtaataagtaataataccggtgacgctactaaaaatcgtaaactattaaattgaatggatgacatatatgccacgccatactttcctattgtataatttgctccccatactaatgcaacagatactaggagccattccatttgccatcgtttcatccgaatctccccttccatatttagcatagtaaaattggctggatataacaccgtccaattggctgtttttttacccagccaatttgttatactgaatgtatataagagatgcggaggcgtttgtatggaatggaagctagataacgacagtaaaatccccatttatcagcaagttgttgactttattgaaaaacgtattacatacggagaacttcctccaggaagcttcctaccttccgaacgaaaattagctacacagttaaatgtaaaccgaagtacagtaacgactgcttataacgaactacgtgctatgggaattgtagaaagtacgactggtaaaggtacacgtgtaagtacacatatgtggggcgtttctccaacattaacgccgaactggagaaatttcgtagaaggcggtacgttcttaccaaacttaccgttacttcgccatattcgggcagaagtacaacaaaatgaaaatattattgatttcgcaaacggagaactcggttgtaatctctacccacacgatcaactacaaacaattttacgagaacaaccgttaacacattcattaagttatgatcatccacaaggctatcttccgctcagacaagcggttgtaaaatatatgagggaatatttaaaagttgaagcaactgagcaatccattatgattacatctggcgcacagcaagcacttcacctgatcgtacaatgtttattaaatccaggtgatgctgttgctttcgaaagtccttcacactgttattccctgcctctattccaatcagcaggtattcgtattttcccattacctgtcgatgaacatgggattaacccagatgatgtacaggagttatatagaaaacaccgtattaaaatgatctttttaaatccaaatttccaaaaccctacgggaacgatgcttcatccaaaccgtagaaaaaaactattatcactttgcgcagatttacgaattgcaatcgttgaagatgatccgtccagtttacttacgctagaaaagaaacaaccttgccctactttaaaatcgattgatgaaaatggaacagtcatttatgtacattctttatcaaaaatgattgcgccaggattacgagtcggctggctcgtcgctccgcaatccgtagtagaaaggttatccgacgcaaggcaccaaatggaattaggtatgagcatattcccgcagtggcttatgcagcagtttttcgaaactgtaccatttcagtcgcatatcgtaccgttacgaaaacaactagcagaaaaaagagacgttatcgttcgcgccctaaacgagcaacttcacgataaaatctctttttcaaacccaaccggcggtatatacatatgggggaaactaaaagaaccgataaacgaaaaacaacttattatgcaaagtttaaaacaagaaatcgcgtttatgccgggtagtattttcggtgcgaaagatggttatattcgtttatcttatggaaaagtgaatattgatcaaattgaggaaggtatttctcgtttgcgtgaggctattttagtttgtgaaaaataactttacataaagctctatcgtttgacaaaagaaaaatctaccattattatcaacacgaacctagttaccccgcattaacgggcaataaaactcccagctcaaaattcagctgtaacaaagaagttaggtgggagattaactgcccgtaaatgcccgattggttcaactaataatcagtggagggtgaatccccccactgattaaagtttcactttataggagtggtaaaaatgaaaatttacgttgatgcagatgcttgtcctgtaaaagatgtaattatttttgaagctacgagtgcagaaattcctgtaactctagttactagcttttctcattattctaatgctcagcagcctaaaggtgtagaaacaatttatgttgattccggagcagatgctgcagattaccgaattatgcagttagcaaaaaaagaagatttaatcgtaacacaagattacggtcttgcttcgctcgctttagcaaaaggctgtatcgttctacaccataaaggctataagtatacgaatgataacatcgaacaattgttacaaacacgatatttaagtgcaatggttcgaaaaagtggtaaacgtacaaagggaccgaaaccatttacagcagaagataaagagaaatttagagagctctttaaaagtatgatcgcactttaaaaatgaatcgtctatttgcaaggaaaacttcgcaaaacaaagaagagaatatcgtaatgaacattctcttcttgaggtttaccctttaaaatgaaggtaaattatctaagttattttcttttattccatcaggttcactacgtataatatctctaccatacttatgaaatacgtccacatgagctaacttccctgattttgcttcactaagagcagtcatataatctaactctctcccgctacttgttttaaaagcaatcaaatcaccttcatcatttttacgaacagcaacaatttgttctgctcctgaagtaacttcctgagctatttcaaattgagcttgctcttccccttgatgtaaataatcattatatactttttcaaagtcttttttgtccattaaactcacctccaaaacattttattagtatggttgggaggtgttggttttatgtacttttctgttagaaaaacgaatttttaatacctacgcaaacccttcaaagtctccaatatatcatctgtaaaggctgtactaccctctgtctctaaagctctgaaataaaaacttcttaggaaagttctaatattttgtactaaaatagcatgctgcggatgtcggatgtcttcaacagttgctatactatgtaaccagttgctccactcttcttcagttaaaagattttggtcacgtaaagacataattggctttactaatctctcatcttcaaagtgtacatatacgtaatcacttaatcgaaccttttgacgaacagctgcaagaattgcatatgaaaactcacgattttgtatagtacgcactaaagcatctagtgcatcagcagcgtgtgcagtagagtgtgcccagccttttccttctacgtaacctcttacatcttcttctaaatatacatattccagcacttgttctgctacactgtacagttgttcttcggataacaacggttctctttcatgaacagataaaataagtggtggaattaatccggagaatgcacgtttaaatacagagtctgttcccttttcaccaattttataaaataaataatcaggactaattgcttgtaacattaatcctcttaactctttttgtctaaatacatcatttgtaatccatgtgtgaagcgtactataaattaaatcatcacgtaattcagcatcaggtgatccgatataatctagcatccactgcgcatatggatatgcatctacgtcttctggtacagcataattgttatttttaatttgtagtagttcttcttttagttctagtacttcattcattatatttcttgtcccctttttgcgttttttattgtcttatccccttttatttgcttcataaaattaatttaattataacaataaacaaaaggctatacatatatttctgattatgtattacgctctttcatgaaatataacttctggatttcctaaatcactattcttaaatataacattcgcacactctttcggattatgctcatctatatacattttacaagccgcgtgatacctgtttaaaaacatcttctctgcttcttcataacttccaaaagcttcagtttcccgcttagcaccacgttttctcgcaatctcaaaatttgtatctacaaagattttgtaatcaaataaatgcgcaacgtcttttttcaatagaaacgttccatctactattaatatcatattttgcgtggccaatagcggctcattatgtacaggcatatccgttattaagttatgagaaatcgtttcatactgtaaatttccgttaggtcctaaaggcattaataatctttctttgaaagctgtataatcgtgtgcatcttcataataccctcttgcagattcttttccttttgcatagcgaatcactcttggattatgaaaatcatcaatgctggcgcgtgttactggtaatcctcgtttttttatttcttccgctagttcgcttgcaaatgttgtttttcctgaggctgtaataccgcttactccaactcttattggatgggttaagtttagctttacaatatgatctgcaatttctttgattcgttgttttcggttcatgatatctccctttataattagtttacataatataattataggtaataattcatgtcactatttgtcggtaaatcgatatcctttctcgaatcgctgatatctcgaaaaaatcgttgatatattttaagttatgatagatatatttgaaaaatcgttgatatattattagcttacttccccttaaaccctcgatataaagcagtccgtaattcttgtttgtattcttcaatttctggcatttcgagttcttctgctagtctgatagctaattcaatatcatacggtactcgtacaagttgaatagaaaagctcgctgcttctttttcattgtaagttccttcaaatattaaataggaagcttgtgttatttcaagtgggtttcctacgctaccggcattacataacgttttccctctgaaattttgaacgaatgcttggtgaacgtcaccgtaacaaacgacatctggttttctttccccttctatattttccgtcagatcactattttcgaacatactaatacgttcttctcttgaagcgtgtggttgaattctttcatataaacttctcggtgaagcgtgaaacatacgaatgaatttcccactcatataaaactcgattgaaaatggtaagtttcttaaatagtcattttgttcttccgataattgtttttgatgccatttcaatgcttcaaattcagtcggctttgtaataaaatcatcccagtttcccattacgactacttcacattctttacgaatgatttcaattgcttcactggaatgaggtccttttcctactaaatctccaaggcaaataatgcgctcgattcctcttaatttaatatcattcaacacggattctaatgcttgaatattaccgtgaatatctgaaattactgctattttatccatataaattactcctttatttattaaattcgcttgattgataccattttggaatataagatgaaaaatgattatgatcttctaaaattccatttaatctttccttcatatcatctactaaatgcggtgtacttcgattcgtccaaacgatatccgctgggaatgtcatcgcgacgtacaatgtatacagtttccaaaaatgaagcgatggttcgcctccgaaataaccgtgaacttgtccaaccgcaaatggtttacttattcttatagtaaaaatcgctacgttataaaaatcgtgtattggatcaccaaaatcatatccaccaaaatcgataacgataaattccttattatgaatcatgctatttgctggatggaagtcatcatgtaaaaatcttattggacgatttcccaataaatctttatgattttctacaaaggttaatactggcttcaaatccagaaaattcacctcgtaatctgttagtgcctctatgtatctttcgtatttattccatctagatgtttcccatttattacttgcactttctctttcaattgggtgaatcctctttaatacttcccccgcttttcttcctgccttatactgttcttccaccgataacttcgttaaaccttcttcaccatttatacctcgggtccattcaaatacttgaacacatttatttaatttctcaattattatgaaatgaattaacttgggtgttggaatatgtaatgactctaattgtttcatatacgtatattcttcttgtttacgttcaaaatgaacagcatcacatacttttacaaaataggtttcttgattctttaattcaattttatatttctcatcgaatgaaaagccttttgaaataacagtcgcttttaacatgcgaggccattctagtattctctctatctctctaagcatttcttccacaacgttcacctctattaatatatgtacaaactccctaacacttcatgctctcgtttatttccccctttaaactctactgcaaatggatattcgccatgattctttatgtattcttgcactagaccttctccaaccggttcacaaaactgtacttgaatgtcaccaaacgatacactttgacactcagcattccatttttcatttttcacaactgagcttgtagatagtcccattacttctttccatttccgtactgtttctcgaacattttttactgcgtaatgaatcgtttcaatttgttgcactttgtttttatgttcagtaatcgtcccactgttacgtaaatcgtttcttctttcttcgtccgtttcattccactgtataaagaaaggtaatttcggtccgttctcttcttgcttaacgaataacattttccattctaaaagtcggccatcttttctcatacgtttcccttcaaatggccctatcgtatgtaagccgtacttattaaagttaactgctagctcctcaattgcatctgttcggatcgcgatttgtagcattccttctccattttgtagtttcaccactgtttcttgtactaatggattttctgcttctttcgctttttcttcatgttgaactgctaaaaattctatatatgataaatcaaaataacttaaactattccaagtaccccaattcgtatgctctccgcctaatacagtatgaaatcccagttcctgcatttgttttgccgcttcctccggtgtaccatgaactgtgtgaacgagatgatcaaatcgtaacatgtctttctcccctttctctccatccttttattgtatattttatttttctttcattcaattcaaaaactttaaaacccagttgatttatacgattaatatgtattataatgaaacaaatttaattattgctgattggaaaaaccaaaggcacttttctcatacgggaaaagtgtctttttcatttattattacagggggattatttatgcagaaattaattgtctttgctattattggatttttcgcccaattgatcgatggagcactcggaatggcgtatggggtaacgtctacttcactattattaatgtttggtattgcaccggctgtagcttcagcatcggttcatttagctgaagtcgttacaactgcagcttctggcgcatctcatatcaaatttggaaacgttgataaatatacagtttccaggcttacattacctggggcaatcggcgcatttgttggggcatgttttttaagtaatttgcctggagatataatcaaaccgtacatttccgtatttttatttactttaggggtttatattttattacgattcatcattcaaaaacaaattgtcacttcaaataagcgtatgtctgccaaacaacttgtgccgcttggtttattcgctggattcgttgattcaactggtggcggtggttgggggccgattacgacacccgttcttctagcaagaggaaatgaagctagaaaagttattggatctgtagatacgagtgaatttcctgtttcactcgctgcaacaattggcttcttcatctcacttggctgggaacaagtaagctgggtttgggtatttgccttaatgctcggcggtattgtcgcagctccaattgctgcatggttagtccgcatcgttccgccccatttacttggcatattagttggtggtcttattatcttcacaaatattcgtacactgctttctacatttaaagtggatccaactattatttcactttcttacgttgcagttggtcttgtcgttattatttctattttcattgctgttcgaaatcattccaatcgtcctaacgcatcaacggctgagtatccgaatgatcagaagcaaatgctaccataactataaaaaataccgctcaatttagagcggtattttttatttttctattttccaattaatcatcgtttctgtagcatttactctcttcatatgtaacttttctaaaacacgcatcgaactatagttatctaggagtgtctccgcaattattgtttctacctctcctgttttgaaagcccaatcgattagttctcttacagcttctgttgcatagccctgattccaatatttctcaataaatccatagcctatttctactgtttgattctcgtttggtttccctttaaacccaatatcacctaaaacgctatcatcttctttccgaagaacataccacgccccccatggtaataaagccgcatcttgttttacattctctacatgccctacaatatgcggaccgctattatatccttgctcgttagcgacttgaatactctcttctgtacacggcactatatagagcctttctgtttctaatttcattttgatttcccctttttgcttaaacgttactctgattataacaaataatatgactttatcatgaatgtcgaattatatttttctgaattttctttttatttagagggtttttcaatattttttgcgaaacatttgtataacaattttttctttgcttattgctacataatagtaggttcgggtggagttttgcaagcgtttcctatacaataaccgatattttttgacttttcctaacaaaatatcttgcaatatattcagaaagtcattacaattgccatatattaaaaatcttagcaatatataaatcctcatcaatccgatgaggtagaggttgcgacttttaatagtaaaacggacgagacacagagaatgtcaccgactccgtttgaaaggaaaagttgccgaagtttatatttcttctctggaaatatgagctggggctgtctccgaaaggaacagaactgtcacgtttacaaaattaccgtgtaaacgtggggtgctatcttaacggaagggtatgatggggtggttatttgtgaaacgttccgccaaattcctttggcggttttttgtatttttctcccccgctccttcctaacctacaagaaaaggagtgttgaacatgaatagcgcaacaaatcaatctacctctaaaacgcaaactacacaaggacaaggtgaattaaaacgcggattaaaatcgcgtcaccttacgatgatttctctcggcggtacaattggtaccggactatttcttgccagcggtggtgtcatccattcagctggtcctggcggcgcattaattgcatacgccgcaattggaattatggtttacttcttaatgacaagcttagctgaactcgcagcttacatgcctgttactggatcttttagtacgtatgcaacaaaatttgttgatccatcacttggctttgcacttggatggaactattggtataactgggcgattacgatcgctgctgaacttgcagccgtaacattaattatgaaattttggttcccagataccccttctcttatttggagcggattatgtttagctattattttccttttaaactatttatctgttaaaggatttggtgaatctgaatattggttcgcacttattaaagtagttacaattattatctttttaattgtcggctttatgatgattttcggaattatggggggcgaaactgttggattcaaaaacttcactgttgcagatgcaccatttaacggcggtatcatggcaattatcggtgtatttatggcagctggtttctccttccaaggaactgaattattaggagtagctgctggtgaaacatctgatccagaacgtaatatcccaaaagcaattcgttcaatcttttggcgtattcttttattctatatccttgcgattctcgttatcggtttattaattccttatacaactgaaagtcttgctgcaagtgatgtaacagtaagtccatttacacttattttcgaaaaagcgggcgttgcctttgctgcctctgttatgaacgctgttattttaacggcagtactatctgctggtaactctggtatgtacgcatcaactcgtatgctttgggatttagctcgccaaggaaaagcaccaaaattcttaggcaaattagatagccgcggtgtacctgtaaacgcattaatcgtaacgtcaattgtcggtagtatcgctttcattgcttctttattcggtgacggtgttgtatacatttggttattaaacgcatctggaatgtctggctttatcgcatgggttggaatagcaattagtcattaccgtttccgtaaagcatataccgtacaaggcaaagatttaaaagacttaccatatagagcaaaatggttcccattcggtccaatcttcgcatttacactttgtatcatcgtaattttaggacaaaactacggcgcatttatgggtgaatcaatcgattggaacggcgtactcgtttcttacatcggtttaccactcttcttagtactatggttaggatataaatttacgaaaaaaacaaaagtgattccacttgataaatgtgaactaaaataaagtgaaacgagcaaacaaatttgtttgctcgttttttgttgcaaacctctttgcttccctattgctcctgtttttgccataatagaagaaatataattaaaggttgggatacaatgaacattcgcattactgatgaagcaaaagcagctatacatagattagaacgtaaagacaaaaagatcattcgcattagagggacaatgacaaactcttgtagtattttcgttgatgtcgatttaatttgggatacatataacgcagatgatgttgtatatgaagatgcagatcttatcgtacaaatggattcattcacgaaagactacactggtgatacggtgaaacttgattataagacgacaggttttagtattacgactccgagtgagactttagtttatggattgtcgattaaaaaataaaaattgttttcatttgaccactgaggtgaaaaaatgggtaaatatgttccgttaaaatttttatttaacgaagaattagcagaaaaaatggctgattctatttgtaaacacgatcctactttctctaaaagaaactttgtatcttccgtaacatgtaaagttgaaaatttagagttaaagcatcgtattgaagtaattgcagatgaattacacaatgctttacaaaaagattttaatgcagccatacatatattgctgaaaacattaggaccagaaaatacaacagaagtaggcacatttacatgtatgaaataacgaaaaggaatactgctgaatatgccattcggccttttcttcaaacataccatgaagacacactagacatattgcaacagtggattcatgacgaaaacagccacattagaagattagtttctgaaggtacaagaccaaggcttccttgggctaaaaaaattggagctctaaaaggtgactttaagaacaatttacagcttcttgaacctttaatgaatgacccttctaaatatgttcaaaaatctgtagccaatcatatgaacgatattacgaaagaagataaagaactcgtttttcagtggttacagcaattacgtgataaacagcatcctattaaaccttggattataaaacatgggttaagaacaataataaaaagtggtactttaccaaaagatttttgtttttgagtattttaaacaaaaccgcttatgcttcaaaaatgaaacataagcggttttccttttgaatacagaaataacaaacataaaaagcactttaaatttcttctttatatcattattttactaactcttctatgttattactttccttaattttttcggatgatagccagagtgaataacttgttccatccttgttccttaaatatatgttaaaatccttattatatagttcttctttaagaatagtgactacctttctcaaatcatctattacatatggatcatttctatattttatctcactgtcattgaaaactaatgtcaattcatactctagacaattgccgtctttcgggtgtggacaagtaatatcctcaatttcaaaacgatcattttgaatttcatttaaccttacgcctacttttgtttcagtttgaaccaaatatgtccaataactgcttactgtgtttttcattgttaaaagcagttcttctttcgttatagctttttgcacattttgaaaaggcaagcctatagattcaccattataatcctcaatttcaagtgttgttatctttctattactcttctgaatgaattggattagagcatataaacgatctaattcttttgattcaaattgactgtaatcaatcttgtcactcgtttttaaagttaataataacttatccgttggtttctcctctatatcatcatccactatatattgaaaaacatttttattttcaggttccacgtaacctaattttttaatttcttctagcattggtttaaatttcttatattcctcatatgttttttttccgtattgatattcatcaccttttattcttgaatataagaagccatctacctctactctaaattgaatatttttgttattttttgcttgaacagtatgatatgtatgccccatatttccttcgtttatagcaccccaatgtgttacaatcacatcaattccgtgcttttttttcacatattttttcacctgatcgtcatctttataattacacccacttaaacataagaaacataacaatagtaacattacatttttcattcttttcatatagcaccttgccctcttttcgcataaacaaaatattccatatataaagaatactaaatcgctgaatgttttcaaagaattaaaatatttttacactcggtatatatatctatttcttttattaatggctctaataagttttaatattgataatcgaatataataaaaagaaacctaaatttaaggtttcccatttttaccaacaatttaaattttaatagatattttttagccaagtaataattcgtagtacctgaaacgactcaaaccaagtaatgaaaaacaggacaacaaagaaagagataagtgatatgaattttaatcttccatcttcacgtctagcaatcgctataatactcagaaccactccaattaaaaaagaaatataccctaataggataataggctcagaatagctatctattatcctatttaatccaaataataacattccaaaagtcatcaaggttattgaaaatacactaaattttttcataattcaacctccaatataattttactattttatggagagaataatttttttatgcgtatgaatgaacaattacactataaaagtagataactcaatttactttttcattaaacaactgccttcttttataccctcaaaggattttcactcaattaacccgaatatataaataacaattctcacaaggagtaactttatatgaatctattcgaacacgaaacataaaaccgttccactttaataagaggtcctccctttttcttttctcatcatatcatccattaaaaaaataggaggacataattatgaaacgtgatccattatttttaactttattagaaagtgcaaatacacattttagcggttgggatttttctttcatttcagaaacgggtcgaatgaagagcgagcctttatcgtggtcgtacggcagtactgcttttcagcttatgcaacgtgcagaatcaatgctcgatatgggtactggcggcggagagtttttatctatgttacaaccgttcccgtcaactatattcgctactgagggctacgctccaaatgtgccaattgctcgaaagaaattagagcctttaggggttgccgttgtagaagtgaccgatgatactgctttgccatttcaagatggtcaatttaatttaattataaatcaacatgaatcgtatgctgcttctgaggtaaacagaattctttctccaagtggcgtttttcttacacaacaagttggcggtcttgattgcgcggaacttaatgagcagtttggctcaccactaaatagcgaatttgcaagttggtctctcgaaaccgcatgcagtgagttaaagcaaaatggatttactatcttagatgcaaaagaggaattccctttccaacgcttttatgacattggcgctatcgtctattatttaaaagcgattccgtggcaaattcctgattttactgttgaaaggtattgtgaggaattatatcgtatacatgaaatcatcttacaaaaaggttattttgatgtgaagcaacatcgttttatgattaaggcgatttgtagctaacaaaaagaggtggcaaagccacctcctttttgctccgtttacatatgttctctactctttcataataagaaaagttatatcatgcatattacaattatgaccaatgaattgtatttctgaaacatataatcacctcgcatatatgatgagagcaaaaacgtgatttttcactttcctcttctattgagaaatgagttgtttttcatatcgcttgttcgcatcatcttctgtcaaacatgcagttgtgtaatgaataatattccggttatcatacgtaaacatatgttctaacttattttcttctgttaatactgtcggtaagtattttggtaaattgctaactactcctctattatcaccatctaatatccaatcaatttctttccattctaatagaccttcagccgtacgtaatggtgtattcatttgcattccatctggcaaatcagcaacgaacacatacattccttcactagcctggggctcatctttacctttaaaaccaacagtccctttatacgttacacttgaaagttctatgcccgtttcctcaaatgtttctctaattattccttcgtatggcgtttcattatcttctatttttcctccaacaccattccacatccccatattcggctttttatttctatttaatagcagtattttatcgctttttctaataaagcaaattgtgtatttgtacatacgatcatttcctttcattttccacatgagttatttggcttattttcaagtatcgacgagtctaaacataaatttttcatatcatttaatccaaaaggttttttaaagaaaataaagtgaaactttaataagtggggttttgctcctctcccacttattctattattttcatttttgaaaaaggataatatacaaattccaccttgccaattatgttatcttcttcaatatatcctaagccatttcgactatctctacttacttcgcggttatctcccattacaaataacttatttggcggaatttttgtcttttgaaagttataaaacacttgtgtgttgttaaataaatctttgtttgtatatggttcttcttgctttttatcgttcacatatacctttccgttcgttatgttaattacatcaccaggaagccctattacacgtttcacataatatttcgattcatccgcttcctttataatgacaatttctccgtgttgtaaattagaaagacgtactactgctttatttacaaatacgtagtcttcttcatataaagtcggctgcatcgattccccttccaccttacataaagtaaaagaatggtagcctatgactatcaccaatataaatagtatgtactttccccagcctctcttaatctcctttttcatatccattcccaccttataaagcgctttttaactcaaaaaatatatcactgcacaatatgtttccatgcagtgatactatttttactgtgccttgttcggttgttctactggaattgaatttgtatttgatctatttgtttttaattcaaaatacgcatccaaaatctctttaccaatcgcagaattaattcctgatttatcatcattcacccatggtacaacaactgaaaaagctacttccggatcagcatcatatggtgcataaccggcaagagttaaattataacatttttttcggttgttgttctcatctcttccaatatcactttctccaccatatactgtctcagctgttcctgtttttcccgctggtttatatggtagacctttaaacgttccggtacctgttccgtcagcttcttgaaaaactcttctaaatccttcttttacatgattaatgtacgaagtgtccatatccactctatttaatacaactggttcaatcgaccgaacgacttttcctacatcctctggtctattcggttgctctctaacttcttgtacaatttgtggcttcattcggtaaccgccatttgcaatggttgaaatatattgtgcaagctgaagcggcgtatatgtatcatactgtccaatcgcgtaatcaagtaaaaatccgggtatgttatcagttctacctacttgaccaattgattcatttggcaggtcaataccagtcgacacacctaggccaaattgtctaaaatagtagcgcattttattaaatgtttcttgtttaatatctaatggattgtttgggacataattaatgcctgccatttttaaagccgtattaaacatataaacgttcgatgacacttgcaaagctcttaaatcatcaatatccccaaattctttccacgatttcttcggcttagaacttcctttaaaatacattggtgcatcaaagaaatgtgtatacggcttaatcgcttctgtttgatatccagttaataaagtagcaccttttacagttgaccctaactcataagaacttgtcatcgttcctaatgcataatcttctatttgcataccgccatctttatttacaattttctttcctgccattgataaaatttgaccgtttttcggattcatcattactacgaacgcacgatccatcatcggctctgcagcatgaaaggctcgtaaattcttttcaagacttccctctactcttttctgtaaatccatatcgactgttaacatcaagttatttccactttttccttcagtcactttttctgtgcgaacaatcttccctgctttatccataatatttttagactgttctttcgttccgtgtagtgcatcttcgtattgtttttcgatgtaacttttaccaatacggtcgtttcgattataatcacgaactaaataataatctaattgttctcttggcaacccttcattttcattagaaacgctacctagtatagagcgcagtattttatcatttgggtattcacgttcccaatctactgttgtatctacccccggtaaacttgccaacctttcactaacgacagcatattcattttgacttacatcttttttaacgatttgcggcgtcattttatatcccgcattcattttgcttttaatggctagtacttctaggtcttcttttgaaagttcacttaattcttcttgtgtaattctttccctacgtaactcttcaacttttttatctaattctttcccttctatctcctgctttctaaatttactctcatcttctttcgttactttcgctgctgcccgcttttcatttaactgcatccaaaaatcctttttatctgtttctgttaacttgtctatgtcctcttgcgacatttcaattagcttagctaaacctcttgctacttgtaaaacttctttcgagtctactcctctcattttcgtatatgtaacggttcgcaatggtttattatttacaataacgtgaccttgccgatcaaacattttccctctaggaacgggagtgcttaccgttacatcttcctttttatttacttcatttctatacgtttctccatcaatgatttgtactttacctaattgaattataatagctgaaaataaaagaaagacaataaaaaatagtacatttaaccgaaatggaatatgagtctttttctttttcgatagttttttctgctcctttttctgtctcatttcgctccctcgcttcattctattaacatttctacgcaaagtcattatgtatcaaatttatttatatgatatatatagaattttatattaattataaaagaaataaaagatttaattttcagttttttatttttataccctatttattaccattcccttaatgcacaataaaatgaatattattctaaaagaaaaatggagcaaatttatttttataccattagtttacatttctttgtatactaaagaaataaattcataaaagacattacttaaggagagaacgaaaatgacagattcgtttatcatacatactaaaacgccacattgtttaaactttatgatctacattcaaaatatttatctcaatcaaaaaggaaaaaaagaaaattttcgttttccttacataacaaaaacattacatttctccactgactttaaaataaatttcaaagaattatggctgactcttcgtaagcaaactgctaacgacagatatgatttacaaatttttcatgaagaaaaccatatcttctatgagaagctttttaacacccaattatgtaatgaagactcttttaaagaattagtatgtagttttcaagtatggtggactagcatagtaggtcaactttcattagaacgttctgtagatgaatatgggcaacaactttttaacgatttagttttatacttaaagcaaaacgaaatagaacctttacaacagctacatattagcttactttatgacgattgtttattggttaaagaaaacatttcttcctattctgctattttgccgactaaaaccttttttataaattatagagatgtgattactacattatcgacctgttttcatgttgcttaatacagcgattacccaaataaaaaactgaggtagatacctcagttttttcgttaacttatttcattgaagataacccttcaacaaactcaccaatcttattttgaaaaacaaagtcaaagttatattcttgtcctgttaactcttcatttactaaaatagttgttgcccctacttctctctttgcgatttccgggaatgaagcgacaggttgtacttttaatgacgttcccataacgagaagtacatctgtttcatataaacgtttcatcgcattttgatattgaggcagtgtatctccgtataaaacaacgtctggatttaaaatgaaattacacttctcacagcgcggcacttcatgatcaatcatatactgtaaatcatatcccgctttacacttcggacaatgtgctgtttgaagtgttccatgtaaatcaatgacatgtttactgccacctaattgatgtaaaccgtcaatattttgcgttaaaatcgtaatatctttcccttgttcttctagctcagctaaaaaacgatgtccacgatttggtttatattgatggaacgtattaatttgaaagatttctttataatgcttccaaaattctttcggacttcggttatagtaccctcttgataaatacatctccacattcgcatcagcatacaatccatttgctgaacggaaatctgggataccactttccgtacttgcaccagcgcctgttaatactgtaattttcttcgctttttctaaaattaaacgtacttcttcaaattgttgcacaaaaatcacctctatgtattttcctattcttattataccagttgtttacaggaggtgttgtacaattcattttacttaatgcgttgcgcccccaatctctacaatatctacttcaactgtcatcgttacttcaattgccaattctattcccttactaatagtagaaagtgacatactcggttgccctggataattactcgcttgttctggtaaaaacggaatatgaatgaatccgccttttattttcttatcatgtttctctaattcatgcataagtccatagaataagtgattacaaacgaatgtgcctgccgtctgtgaaacagatgacggtatgccctcttcgcgaagtttttttacgattgctttcatcggaagtgtagaccaatacgcaatcgctccttcttctacaaccggtacatctactggctgattcccttcattatcagcaattcttgcatcatcaatattaattgcgacacgttctatcgtaatatctggtctgcccccagcttgtccgatacatatagtaatttccggccctagttcttctatatactcttttaatacgcttattgatttatgaaatacagttggtatttgtttgcttattatcttgtattctccaattgttttttcatgcaaaccttttgctacttcccaagctggattgatattttctccgccaaacggatcaaaccctgttaataatactgttttcatagttttatcctcctaattaaaaacgatatacaaggccgtacataataaacatatttatgataaaaattgaaagagcaattggtacttgcgctttaataaccgcatttttatcctttagctctaaaagcatcgcaggtacgatattaaagtttgctgccattggcgtaagcagtgttccgcaatatccagcaaacataccgagtgctgccataattgctgggtttccgccgtgcatttgaactattaaaggtaagccaattccgccagtaataacagcaaacgctgcgaatgcatttcccattacgactgtaaatagcatcatgcctaaacagtacgccataacagcaacgaacggatactctgtcggtaacacttgtccgactaaatcagaaacgacttgtccaacgcccgacttcgcgaaaataccgccaagtgccgctaacatttgtggtaaaataacagcccagccgacagcttgtaatagtctgcttccttcttgaacaggcgttgttattttcgattttgtaatacgcatcgccgcgacaaatgcgagtaatgcaccaagcgctaatgcaactaaagttactttatctggatcaacaagagagacatttccccatttaattttccctaacgtcaacgtaccgataattgtaaaaataggaattaatagtgcaggcataaaaattttattttttaatttctcagcatgttttacacgttcttgtactggaacttctttttcctctgattttgtcactttatttagcgaggctaaaacgaccatagcgagcacgatacagccaacgtaaaacgaaggaattacatttccaaataaaaatgtaactgcaaacaatgcccaaaataaactagaaccgaatctgtttggatgttcacgatcgaatgcgatacgaacagcgataaaagcaacaattatccctaatacataatagattgtatccattgtgatgatgttcatattagattgcctccttctcttcttttccttctgccttcattgttttctctatatatttatcaaaccttctaaatctaatccagcttacaataagtgcagatattgctgtcggaatgccccaaagtgccatatcccatacaccgacatgcatacctactgaatcgaagaatcctttcattaataaaatagcaccagttgcgatgaaaatatcttctccgaaaaaccaagctgtattttccgcagcagctgcgtttgctttaatcttttctcttaatttttcaggaagtttaccgtatttaccttgcgcagccccttctgccatcggtgcaacgagcggccttactgtttgcgcatgcccaccaatattaagccctagtgctgctgatgattctcttatcgtaaaatatgacattaatactcttccagttgttgctccttttgatttcgttataagtgcttcggctctttcttttaaaccgtaacgctctaaaattccgattaccggtaaagttaatataattggcatagacatatatctattttctatgaaaaatttaccgaacatgctgatcacatcataaaaacttaatcctgaaaccataccagtaacaatacctgcaaccataactactaaaagtgtatttaatctaaataaaaagcccactgccactaataatatcccgattaatttcaccaattccaacacttcccctcattttttatttcggtgcacatatagaaataccatcatgtccgaatgttctgtatattctttctgcaaattgcactgctttttccccatcaccgtgtaaacaaatcgtttgcgcctgaactgctactttctctccattgatcgaatttacatggccttctttcaccatttgaagtacttgctttatcgcttcgtcttcatcttttataagcgcattttcttctgtacggctcgttaatgtaccatcttgcttatacgtacgatccgcaaaagcctcttgtacgagagttacattgtatttttctgcagcctgtataaacgcctcgctatttgctaatccgtaaagtaatagacttggatttatatgataaattgcctttgcgattgcatctgcaatttccggattagacgccgccatattatataaggcaccgtgcggctttacatgatgcatcttcccgccagccacttttacaaacccgtctaatgcgccgatttgatataaaacataatcgtatacttcacttgctgaaacattcatgtttcttctaccaaatccaattaaatcaggaaatccaggatgcgcccctattgctacgttatactccaaagctttttcaacagtttgacgcataatagacggatcacccgcatgaaaaccgcaagcaacgtttatagaggaaacgaacggaagaatttcatcatcattccccattttataaactccaaaactttctcctaaatcacagtttaaatcgattgtagtcacaatgtattcctcctaattccagcttcgtaaagcgatgaatttctttaatagattcatatttacttcttgttctatgtacaattgttccgcttcttcaagcgtaattttctcaaaagaaacatagtcccccggctttagctgggcaagaagaggtaaatctactgaaatgatatctcccattctcggatagccacctgtcgtttgcctatctgccattaatataatcggctgtccgccattaggaacttgaatggttccaaatgtaacaggactcgataaaatctctttttcttgaatcctatttaaaacttctccctcaaccctatagcccatacggtcagcataattagataccttatactctttcgtaaaaaatgcctttctactttcttctgtaaattgatcgtattcaaagtcagctatgacacgaagcttaggatgtttcttatactttggtagtacgctgttgctaattacccatttcgtttttattcgctcatctttttgtaagtcttgaatgaaacgattcgccatttctgagtacgtaccaatttgaaaacaatctccttttttcagcattcttccttctataccaccaatcgcagcacgtatgtacgtacttttgcttcccattgtacgctcaatatgtataccacccgcaaaagtcacatacgctctacaaccacttttcacttttccaaaacaaagcatactaccttcttccgctaaaatgggacgccataatgggatacgttctccatttaacaacggttccatgtctgctccgccaatcgcaagtaaagtcgttttctttattaacaatttaggtcccataatcgtcatttcgagtcccgcttcattctcttcattaccaactaacatattgatcatccgaagtgcactttgatccatcgccccgccaactggcacaccgtattgttgataatgagatcgccctaaatcttggactgttgtaaacattcccgcatgcaaaacttctacatccattctttaaccccctcaagtgatacgtactcttccttcgttattggaataaatcgtaaatacataccactttgaatatatgttggtatttcttcttccggattaaataatgaaataggagttcggccgataatattccatcctcccggtgtttcaagcggatatatacctgtttgatttcccccaatacctactgaaccaggagagatttgtaaccgtggtgtttcttttctaggtgttcctaattcttttgataatcctcctaaatacgggaaccctggtgtaaaaccaagcatatatacaaaatatgtagtttcactatgtattcgaatcacatcttctacttgtaaaccgtgataatgcgcgacctcttctaaatcaggtccatattcttccccgtagcacactggtatagaaatatgtttcacatcctgttttacttcttctttataagaatcacacagttcctttatatactggcgaacgtaatcatatgacctttcacttctctcatttctcttccatacttcgtatacattgtagtaaacagctaatgaagtaaacgatggaacacactcaatcattcctgcaaacggatgttgctgcagtgcttgaaataaccgctgtactttctcatatatatccatcttaatttcttcaccaaatgtaacaataattgcttgatcccctaacgcagaaaatttcatcctactccctctttctatgccaaaaagccgagttctttcgaaatgcgatgcgctgtttctttcaccttcgcaataaaatatgaaatgttactttcgctgtactcaattgctaatcctgaaatactaatgcctgctacaaccgttccatcgctcgcgaaaatgggtgctgctatcgcggctgtatgattttctaactcagaataactaattgtgtagccttccttttttgccatttgcaacacttctaacaattgttccttatccacgattgttccatctgcaaactgttttaaatccacttcctctatgtatctccgtttctcttcctcagagaaatacgatagtaaaattcttggacatgcaccagcataaagcggtgctcttcttccaactgccgtatacacgcgtactggctgaacaccttccatcttttcaacataaattgcgtcattaccatcttgaattattaaattaactgcctgtcctaaactatctctaagttctttcatataaggaattgctatatttcttactgataatcggtgtgaaacaagttgaccgaaccgtaaaaatacgacccctaaacgatatttccccttttcgtttttttgtaaaaacgccatctcttctaacgagccaattaaacgataaacagatgttttcggcatatttgtaagctgaaccatctcagttaaacttagctcttcatgctcataaaacaactctaaaatatccattgtcttaactgccgttttatttatactcattctatctccctttcgttccgaaaaacggaacttaaattccgtttttcgaaacaaacatataatttaaaattataaaatattctttcaattcaatcaatagattttaagcaaataaaaaagcatggaagaatatctctcccatacttcactacactttataacgctcttacttgtttcaacggccagaaaacagcttgtccttttccaacaatttcatcttctgaaataaagccaaacatgcgaccatccttagaaacttcacgattatcccctaaaacaaatacttggccttctggcactttcgttttccctgtgatttgttctaacgtaaagtctggagttaatacacggcctactgctttttctttaaactgttttaaatatggttcttccatcgcttttccgtttacatataaaacatcatttttatactcaactgtatcgcctggcaaaccaattactcgttttactaaatcgtaaccttcttttccgtggaagacgataatatcaaagcgatctaatccacttatactataaccaatcttattcacgagaactcgttcgttattttctaaagtgggcatcatcgattcaccttgtactaaagaaggtgtaaataaaacaccgcgaataatagcaattaatacaagggtaaaccctatcgttttagcccatgagaataattctttcttcgtattttccttcatcgtttctcctctttcttaagcacttattttattatttcaactaattcttgtactaaattaggatctatttcagaaaaacatgattttccttctcttaccgctgtaccgacgtgcgcctgcgtaattccagtttcatctagcaatcgctttatattttctttcgtcacgccagctccagctacaagctgaatttgaccatcgcttaccttttgcatttctgtaagcaccggaatattctctactatatttccttgtccacctgaagttaaaacgtgagtcactttatgaaacttctttaaagttctcatcgcttctactggattttctatatcatctatcgcacggtggtacgttacatttattccatctacaacagatagtaagtccgctaatttctcttcatccacttcatttcgttcatttaatacgcctaatactacaccagctgctcctaacttctgtgcaactataatatcttctttcatcatttcaatttcttcttccgtatatgtaaaagacttcgcatgcggacgaatcataacatgaattggtatacttaccgcttctaccgctttttttataaaagcataactcggtgttaaaccaccttctgtataagatgaaattaattcaatccgcttcccgccagcgctttcaattcgttttacatcttctaaacatgttgcaataacctctagcatgagatgacctcttttcgtgcttttttcttattataacattagtaaaaataagaagcctagctttctcctttaaaacttaaaaaagaagaatgaaaagaaagatttttttattggcaacaattattggtaacatcctattattcatgtacactcctaccataatgaaaaaacccgtcattttgacggacttttctaatttcaagctttcctttcctcagttttcatatcaatgcctaattgatcttccaataactttacacctttctttgtaagatggacagcccgattcttatccgtttttgtaatccattcctgttcaaaaaatagttttgctattgcagatcctaaccaaccggcaatatggtagcgtcgttcactccaatcaaggcaaggttttgcaaataccctcctttttgtatctgcctcatcaacatttatttcaaaattcagaaaccattgcttaccttgttccgttacaatgtattctccatcctctaaaattataaattgcctatctagtaatttttcagttatctctacaccgagtttgcctgcaagatgatcataacaagttcgagcataacgaatttgttttagttgacctgattgttttaaagaacgaacttgaactgttggtgcgattgtccctaacttttcaagcacttctgcaacttcttgattagcaagtcgatagtaacgatgtctaccatgttgttcaactgtaagtaaattcccttctactaatttagaaagatgcgaactaattgttggatgtgacacttttgccatataagccaattcactagcaggtagtgcctgattattcattagacaatctaatatgattgctcttgtaggttcagcaattagtttagctatatatgagatattcggatatacattcatatttcgatgataccctaactattaaattgatacaattattttaagtttaatagtaaaggagaatgtattatgaatgcaattgatcttagtatattaaatttgaaagaaacgagaaggcgctcagaaaaattatggaattctcttcctaataattttcttaattggaagcctgatcctgaggctatgtcttttggtgagatgattcgtcatgtatggagttcaactttttactaccatatgattataaaaaacaacggttcaataaacgacatacgtatcccgtatgatgacgagccgattacttgtgtaaaaaaagaaattgaattggcacaatcatactttactgacttcatagaatatgttcaatcaataagcatagccgatctagattcaagacttattgatagaagcgatgttggctatcaacgatatttaggcgatatgctattacgaattgcctatcatgatgcggtccatgcaggtcaatttttacaatatttacgaatggtaaacttagaaagaccattaatttgggattaaatacgaaaaatgtttatacagcctccaaactggcattacaataagaatttttcaacaagaaacaatcacaaaaccatgataatcatttatattaaaaacctacatctcaactaagtacttcatacacataaaaagcacgggtttgattactaatcaaacccgtgctttcaaaacaactataatatccataaacaataaaatgtaaaatttaaaaactacgaccgaaacgccgcatccgccagcatagacaatgttgcatcatccatcggtggattatgcagtcctgctctgacgtttaaatagtaacgatggagcggatttttttctgataaactttttgctcctacgatgcgcatcgatttatccactatagatatcgccgcatttgttacagcatatttcacggctgctaattctgcttgcagtgatagtttatcttctgcctcatcgtactttttcgcaatttgatataaaaagacgcgagcttgcataagctcgagttctaattctccaactaatcttctaacattcggcaataaactaatagaatggtttaaactgtttggcttgtatgattccgcaaattgaactgcataatttcttgctgattgtgcaattcctaaataacatgctggtatatgtagcaaccagccaacacccttttgttttactttcccgccttttatatctgtaaaaaagcgactttctatctctacattttgtaagacaaggtcgtggctagcagtccctcgcattgcaacgctatcccacgtttcttcaatagatacaccgggtgtatttcttggaataacaaactcaccaacttcttcttggccttccatacttgctgaaataataaaataatcaagtactggtgccatcgttgtaaaagtttttcttccatttataacccacttctcgccttgttgaaccgctattgtttctggtttgccgccacgcgtcggactccctgttttcggttctgtcgctgccctgttaaagagcgcaccattacgtacttcttcgcaaaaccatttgaacatctcatcattccaagagcgattttccgctagctctttcacaatgccaagatgccagccaatcgataatgcagtagctccgcagccttccgcgattttctcttgaaataaaacaaagtcatataaagaaatcgcactaccaccaaattccttcggtaacgttaatttcgtatatccgatatctttcaaatcatttatattttcatacggaaatgatcccaattcacttagctgatgctccctttccatgaacttcggaatcaatttatttatttgtgcaataatgaaagattgttcttctgtttcaacaaatgagagtgccatactataatctcctttatgttcgattcatcaaccgctcactttttcattatgattatatgaagctacctctctattgtttcactattccgataaaaatacaatgtttttgactaataagaaaagttcctatttaaggataggttcttttcttatgttaatctcctttcaatgcctttaatggcaaagaggttacatatccaatatacgagaataattctttaaagaagaatggaatttctgtgtctaacgttttatatgctgatgtcggcgttggtgaagcatacgcttcaatattaatatgttttgcaattctcattgcgcgtttcatatgaagtggatcacttacaatcgtgtatgtgcgtattccgttctctattccaacttgcttcgcattttttaaattttcttcagtgaaaagggatttagtttcaattaaaatatcttcctcttttacaccttgtttcattgcatatactcttgcagtacgtgcttcctcaagttctgcctcgaactttgtaccacctgtaaaaataatctttttgatatttccattcttatataaagaaatcgcatgattaattctttctttaaatacaggagatggttttccgttccacgaagctgctcctagtacgataccagcatccgttttcacgtcatcatttgctttaaaacgataactccaaatatcgtaagctgcataacttacatataaaatagcagaacaaatcattagtaaaaatacttgaaagattcgtcttttcttactcttcttattttctttcatttgtaattgcctccgtacatcatccatacttctataaaaaacatttatatcaaatcgttttgtttgagtttatttaaaagaaggaactttacttgttatttatgtataaaagggttttcatttaaaattgaggattatcaattcattttcatttgcggttttcattacattttttaaattcataagtttattaccatacaactacattgtaacgaattttttctcagaagggaacgatgaaacaaaaggaattaaaataaagtagcattttgtaagaaaaaaggtatatttttcatgtctcacgaacaatatacctttcaaaacacgaattataacttttctttatataactctaatttttctaacaattgttcttttacgcctggccattcactcgagataatactgtacaccaccgcatctctcacataaccattcggtaattttctttcatttctaagcacaccttcttttactgcgcctaatctttcaattgctcgttgtgctttttcatttcttgcatccgtcttaatttgcactctcagcatatgcaatttttcaaaagcatactggagaagcatatacttacactctgtatttatactcgtacgttgtacactcggatgataccacgtttgccctaactcaactgtcttatcttctactgaaatattatataaacgtgtacttcctacaatcttattcgactgttgatctacgactatgaaaggtatttgagtacctcttccgtaaccctttatcgctttttgaacgtattgttgcatatcttgcacactatccattttagagattaaatacgcccaaatatcccgatttccttctacaatcgaaaacaaagtttcgacatcagtattatccattaaccgcaactttgctctttcgtgaataatttccatttttaagccccctttgttgttactatatcataagaataaaaacgtattataataatataaaaatataaagcaaagaattcttttcaaatatattcttctcgtataaggaaggtaggaagactcatcagtaacccttaaaaaagaattttttggtaattcccaataaattctatataatgataaacgggaggggataaaaaatgctagatcaaattacttggggaacgccaggcagcttattatgcttagggttcttttttgcgggactaggaatcttcttaagaagcgttacgtcatatacgaaaaataaataagaatatcctgcttttaaacaaaagaagccctctttttacagacggcttcttttttataactttatcttattaaaactttaaagcaataaataagcaatcggcgtaataataagtaacgttaaaatcgttctctgcacatataaaataataagttcagatacttttaacggaatatctgttgataatatacaaggaatggaagcggagaaaaacaaaatagatgatacggaaacaactgcaataacaaactttgtcacaattggtgcacttactactaataatgacggtaaaaacatttctgcaataccaactgatgcggctttagcggctaagtctgcttctggtaattgtaatagccatgtaaacggatagaaaatataactgatccaatcaaatattggcgtaaacttcgctaagacgataccaattaatcctactgacataatggatggtaaaattcccatcgtcataataaatccgtcttttaaatttaatgcaatatttttcataatgctcggtgcagactttgatacttctaacgcatcttcccaagcacgttctaacattttttctttataaacaggctctgggaacccttcttctgttacatatgtatctggttttctactgaggggcgggattcttacggtgatagcagtcacgatgaatgttacaacaagcgtagtccaaaaataaacattccataaatgcataatatctaatgtttttgcgatgatgatcataaatgtagcggatactgtagaaaatcctgtagcgataatcgccgcttcttttgtcgtatactttccttctttatacacgcgattcgtaataaggagagcaagcgaataacttccaacgaaggacgcaactgcgtcgattgccgatctccccggcgtattccataatggcctcataatcggacgacaaaatgtaccgataaattcaagcaatccatatccgactaataacgctaaaaacgccgagccaattggaacgagcaaacttactgatatgactagcttctcatacaaaaacggtccaacatctggcgcaaagaaccaagctggtcctacttttaaacaatataatatgccaaatacaacgccaactacttttaaaatagaaaaacaaatgtctacgatagatgcattccatttcttcgtataaaatggataaatcgcaccaattgccataacaaataatgcataataaggtactatgccaggaaccgaagccctaatccacgatacgatatgatcaatcataatagacgatgcaccgtttatcgtaacaggaacgaaaaacataaacactccaacgagactagcaagtataaaccgaagaataattcccttctcttgccctgtcttaattacattactctttaattcaatttcactcaaaattcgacacctcctattatctaaatattctgtataattatgttggattccttctttccatttctactatttcatcatataaaaaaagcctattttaaaataggctttttctactacctctcataatcatccacaatcacttgaatgatacgatacgattcttctgctactttttcattactatccctattcgcatcatatgtaattaacgccttccaaagtgcccatcctctcgctctattccacgtttcttcatccatgcgtaatacttcattaaatacatttctactattttcatcaaaaaacgtccacgccatcgctgcatcacaagccggatcccctactcctaaaataccaaaatcaattacggcacaaagctttccgtccttaacaagtaagtttccaggtgcaacatccccatgaacccaaactggcttacggtcccatgttgaactaagtgctacattccaaaggtgctttaataatgcctcgtcaaaaacatccttattattttcaatagcaactctcgcctcttcagcatatacagatataagcccgcctcggtaaaaattatgcgctccagctattgggccattactcgcatcaatagcctgcaattccactaaaaatgatcctaagtccgccgcaaattcatttaggtcacggacattttgtttcgtaatagtatctccttctatccacttattaatagaccaaggccatggatactcttcagatggatttcctttcgcaattggtgcagaaatcggtaaagaaagctccttacttaatataggtagccacttattttctttctctacttgcggcgcatatgccgcgtcacttggcaatcttacactcatctcatcccctagatgaaacgttctattatcatgcccactaaactttacaggcttcacttctaaatgtgcccatttaggaaattgttcccctatcaatcttttaactaaatcagtatgaatttgattcattcacttgccccttctcttttgaaatttactaagtccatctgtactcccaacatactcaaaaccacttcttttataaaaatcattcagcgtacgattatgtccaacgcaatctaacttcaaatactctttatcacattgtacattctcgtctatccactgtaaaaccctctctcctattccattccccttatattttcgtttcaccgcaaatctatgaatatataatgaattagaaacttcctctttaccaaaaatgtattcatcccattcattttgtttaggagaaactgtaatcgtaccaactatttcatcttctttcataacaacatacgtatatttctctcttatacattctagtatttcagccgtagcttcctctcctaaaagatactgccactgatccacttctttatattgtagccattgtgctacttcttttaataaaatgataatactatcactttcattttcagtagcaattcgaattgcatattctttacttatattgctctccatattgcctttcccctttcaaattgctaccatactgacaaacgagtccttccatcattttcatctgtaatatattctacataaaatccttgattccgtgcgttttcatacatcaattcaatcgctttttgatctttcgcataaatttgtatgcattgagcatccactgctaatacgattagctcacacttactttccttaaactcttcatatgtttcaatatctatcgttttttctcctttaggatatgcttttaaatctgcaaaaataagataatatatgttgtctttaactaactttttcaatgctaacccttccactacacttggttcttctggaaataatgcctcatccaattcaccacgtgctattaagtaggactcctcatccctcactcgccaatcaaattcagtaatatcaattgggtttaacactttccaaagtacattgctgtattcatttggaatatctacaaaaatccctcttttcatatgcttgctcctaacttattcattttcatacattatatatgaaatgtaattactatattttgtcgatacatatgtacatcataaaaaaccgctccactattagcgaaacggtttcctttttcttacatttaaatatttcattcaattgttgcactgccttttaaaataatttctaatatatgcaccacattagccgttcattcttaatgctcacttcgactttacaaaataatataaaaaccatactgcatgattttgttcatccgcagctattctccgtaacaactctttcaaatgtacatcggatgtctcatctgaaatttccaaataaaaatctactgttttttgttcatcttgtatagcgaactctaatccttgtaaatacgtatttgggcagtcttcagtaatttgtggtttcggctgcctgccagttaagttcgtataaatttgtacaaagttgtggaaatgctttatttcatcattacgaatttcaagaatttgtttttgttctacttgatttggagccatattcgctaattttgcatagcagcttatggcgctatactctccatttatagctttttcaatatcactaatcaacttatcattttgcctataacaatcataataatttgaattatacatcgtatccccccatactttcgcttaccattttatgcatttagaaatagtaggagcctgtgtatttaacgggacggctttagaatgaaagaaaagtttgagaaaagggtctattttgcaaaggaattgcttatgcataaaataatactattgtatactgttgctataaactctcgcgggagttaggaaaataaattcgcgaatcaacgattggttcaacatgatgcggtgcgaagctattatgagttaagtgacataattaggaggttccactatgccatctttatttaaaactatggagttccagctaaaaaccgaacgacttgacctgagtatgtgggaggaatccgattcagtttggatgaggaaattaattggcgaacgtggtgtggacatgccgaccctcgactccgttcgtaaccggcttattgagatgcgtaagaaggcagatgaaaatggcatttcccttctcactattcgaagaagagacgaaggcgatttcatcggatactgcggcttgattatcggtcgttccacacttgaagagccggagattgcatacgagttgttccgcagcgctcatggtaaaggttatgcgactgaggcggcatctgttgtactggacgcggcgattgctactgggcgccaaagactttggtcgactgtaggtgcttggaatatcgcttccctccgggtactagaaaagataggatttaagcgtcatcacagtacgtgggatgacgaacgtggtgagattgtctggaatgtacgtgacctttagaaatcccgacttaattctaaacataacacttttcaacaattaggtgtttacattgaggaaaagccagaaaaattaacaaactttattatcagcaaatattcattcttcagcttatagatttcatcaaaaaaagccgtttcactaattatgaagtgacccccgaaagttagacaggtcgtttcattaggcagcctctagggtatggaaataaaaaccagtctatgacccatttttacacgtatctcggctgaacccctacataaaatggatcttgtgtctcaggcttttctgtttcaggtttagtctcaggtttagtctcaggcttcgtctcaggtttagtctcaggtttagtctcaggtttagtctcaggtttagtctcaggtttagtctcaggcttcgtctcaggcttcgtctcaggtttagtctcaggcttcactttgtcttcgctagatggcttgccaagatcttcgggcttcgctttgtcttcgctagatggtttgctaagatcttcgggcttcgctttgtcttcgctagatggtttgctaagattttcaggcttcactttgtcctcgctagatggtttaccaagactttcaggcttcgctttgtcttcgctaaatttttcgccaagatcatcaagtttccctttgtcttcgctaaatggtttgccaagaccttcgggcttcgtcagactcgctaacttttcgacaatgttattggtagaaggttgttcttttgtaggttctaaggaaacaattaatttatttgatggttcagtgttattatggttgattgtttcaagagaaggttctacaggttctataacatctacagttttttcttctttcactattacatcagaatgaggttcttcttgtttagttttatctgtttctttttcattacgatccctttttttgtacttctctacatttttttgatttgaatcttttgcttgttcatcattattttgagtcattacgactgctgttgttacaccgccaccaacaactacagcactaattgcaccaattacagcttttttacctatcaaaatttttgtgaataatttactcatttttactaacccctttttaattgtatttttataatatagtaaataattgcttataggtatataataaaccatatgtgttttaaaatcaacaaatatttaaactaaatatggtttattttgttgttgtaaatctagtgtagaagttaatattaaattaaaatacgcaatataacaatattaggttattagctaaaccaaatgtagtttatttttaaaggtttattaagtataatgaatataaaggaaggagattatatgcatgagtaatgaacagaatcagataagtcacaagaaagatagaaaaaatagcactaaaagtatagatcagcgattagaaaaattagaaatgacattaaaattacttgatatatcttttgatgaattagtaggccttgttacgtattatcgtgctgaaaagcaaaagagtgatgaacctatggaacgatcaggacaactaaaatggaatctagataaattaatgttagaaatgaatttaaacatagatcaagtagctactattgtaggtctacatagaaaccaaatagggaaaataaaaaatcatgattttaaacgtacagatctaaaaacaatagaacgaatttctaaaggattaaatgtatcattagatgaattatttagatatgaaaaagatgattcagtctaaaaagaaggtaactcatttgtaggagttaccttctttttttatgtgttttattaaaaatggtgttttcatcaataattaagtttatttttgatgttttttaatatgtattcattcaggattctcaaattagtttctataggcattttgtttgattgatacctattgtattatggatgcctacaaaaattgatacaagttaatctgaagtgtcattttttcgttaagtatattatattttgctggaataagaaaaaaagttatgaatttataaatagatgaatattttattgttttttaggttttttctttaatggtaagccataatgtttagcatttttaattatttttttagctagatctttagcttccgttttcgacatattcatacagttttcctctcccctactgttttattatttgtatgtccaataagtaggggacttaaacataattctgaaaattaggacatatattatattattccttaggacagtaagacactgtacaaattcttaaattacaaatttgaaaggagaatcgaaatgattgagcaagagaggaaggtaagaaaagataaaaaagtagatattaagccgacaatttcagtagatctcaaagaatgtatttacagactttcatatattacaaataaacctgttaaagatgttgccttacatatttgtgactatgctctccattcaaaagaaattatggagatattatcggaaagttttcgtagaaacttaacgatacacaatactctgtatatgggtgatttgaatagaacatcattagcaaaggtaaaaaagaaggaagattacccaaaagagagaatttctttacgtgtttcaaaaacaacttatgaaaacatttgtaaattgaactatgctctagatgttacaccaactatggcaactgctattttattagaaacatgccttctatattcagattatgtcaatgaaaacgctagatcttatcttgaacaaaacttggatcttaaacgtataaaagaattagaaaaggtaataaaatatgtaaatgaacataatccatatgaagaagaagtatcgtggggggctttattatcatttttaatggatgaaattaaaacaggaacgactaatgttgctcaattaataaatgattggttagattcatataaaaaattgaaatgacaataatcccttaatgattatttggttttcttatttatttataaattagtggtacgtgaaattttatatattatgaagataagtcctaaaaaataagcattgaatctgattcaatgcttatttttgtagttaaagtgataaaatcttttaaggctttattactttaactagttgttctccttctataatcttgaatttattgtctaattcacttgtctcttcaattactctgacactcttttcgattactttgacattccttatatttaattcttcaataatcttttgatattctttatactcattttctttcattacgataattggttgatttcttgctacaatcttgaattcgttacttaattcatctgtctctttaatctcaaacgatatatcttccagcctattaataaccgaaattagatctttccatctttgttttcttacttcaaaattaattattgtaggagaaagccacataggaacatcaatttctatattattttttttatagacttgtaggaagcaatcctcatgatcctttcgaatgacttgtacttctaatctatattcaccaatttcacaaaagaataccacttcattattttgatgagttgtatcttttaaattaataatatcttctttaaaaaattcatctgtctttaagtccattacacttttcctccctttattgttttaaaggtacaaatgacttaatacaaacgctttattactgatatataaattgaacatgtaatacagaaacagtattttgttttgtttcagcattccagtaaacattaattccgaaataagttccaccataatctttttggatcattttatcaataactttataatcattagaagatgtattgaatttttgaatgtttactgattctacagcaacttttgttcctttaggtaaaaatgaagggatttttgcatcttcccaaggttctaatgttccagctttcacctttgcatcttcctctgtgatcttaccgcttgcaatatcttgattcaagctatcaaagtatgatttctttactcctgtatagctaccgtaatttccaagcttttgacgtaatgcactattttctgaagactcttttggaggtgcaacataatatggtgaattcacttcatcattgttatttccattgttattttcattattgtttccgttattgtttccattattgtttccgttattgtttccgttgttgttttcattattgtttccgttgtgatccggctgttttttcatagtattgtataaaaattgtacgtattgttcacgtttcacaagtgtttttggctcgaatgtgttatttcccatccctattgaaataccatttgattgcaccgcactaattgaatctgtagcccaataatttttttctacatcatcaaaagtagtcatagattttggttttaatttaaatgctttcgtcaaaacagatgctaattgttcacgagttaagatgttttctgcgccaaaagtaccatttccgtacccattcataatacctgctttttctaaagctttaatttctttttcaaacatatgacctctaatatcagaaaatgaacttctaaagcttccgtctacatctgctggttttaaaaagttatataacattctagcaacttgaccacgtgttacattatcaccaaaaccaaagatgccatttccataaccaagaaaaatttgtttacttcctaaatcatttatagcttccgtagaccaatgatttgctggtacatctttaaatactggtgtttctgcactagataaacttgcaccaaagaacatactacccataattgaaaatgctgtcgttgtttttaataatttgtgtttcattataaattcctccatttattataaaattagaccatttgtatattatagcaaattgatataaatgttttatccctatagtcaagattctctccgaaaaatacaagtccctcatattctaagttctctagataattggctacatagggatatataagcggttttcccgaaagataacgttttgcgttacttcctttatgttctattaagaattcacataattgtctggtactaataatttcatgttgttgtataaaagatttaataaaacttttttctgattctgataagaaattatgtaatactttattataaattggcttagtgttaaatccctgctcgatccctagtgtcattacttcatcgaataaagaaatttgattaggttctgtattgttaaattcaacagattgaagatttatttcatgcttagtatgttcaaacaagattcctattaatttatttacttgcttatctaataagggtaatttgagttctagatgttcctttatatcccttggaatctcaatatttaatggaagttgaattccttcattattttctaatgaccaattgtttctaagttttattaatatttcatctaactcataatctatcttagtcattccctctataacttgtttaactatttcggctggaatattagtatgttcttcaaagtgacttttaccgaattttaaaattttatttgtctttaaattttttacaatgtattggtaacgtaaagagcgtccacattcacattttagtgtctctgtaacaacacctgcatctatataatcaactaaacgccaatttgttgaaatgtgcttgtagtcttcctctgatccttctcctttttgttgtgccaatatactagcaaaagcggttttctttcctctttttaaaaaattcgtcaaatattcttgttgtacatttgataattctttaaatagaatatctctctccgtctgcgttaaatatttagctaccatatttcacacctcttttatacagccattattttaatcataaggtctatatttcaagcgtaactttttatactctaattctttttctaaaatataagagcgcataaacaaacacacactcccgacttttttcaagggttttagcttaccttcacgaattaatctatttactctatctcttccaatatccaaaatttcggctacttcagaagtagtgagaacttcatctttaataaagttctccatttcttctttagaactaaatttccaattcatccgtatcccttcctaagaaaaaatttattgttcttaataccatatataaactaatcatagaaattactactaaatcaaatttatctactttgccaagatccattgttgcaagatagaggatactagtaagaagtatcccactatctgttttattaatttttaatgtattgatgttcttcattttaaaattaggtgattagtgtgttataatatttctgtggggaactggctgtcaaccttccccacagataaatggttatcggtgcttgcgttctttacgctggcactttttttgttttgtagtctttttcttagctttttttctagctttagcttttgcctttattttggtatgtatatctaaacttacattgataatccccaaaaagctggcaataaagactacaacttttgttgctatttcaatcacctatctccacctccttgattctattataccatacctgacctaaaaaaagtataggtttaagcaaaataaattcaaaaatataaataaaaagatattgttttttcgttgtctttaaaggggttttatgctttttggtagaggctggctcgtggtgtgcggacgaaaccgcacgatcttagcgtatgaacatatagagtagagaataattaaggatcggaagtgattagcggttcggcatactaaaatagtttgcacaagctgatagaaaaccttagtaactttttggtcttcagcttggcaaaagccaaaaagtatgccgaatttctttcgtcaagaatgtgaacagcgtgaacaaaggtggagatttttgagtgttctttactcaaaaatactacctgtttcttgatgaaaggaaagccctttgatgtatacagtatcttttcctacaaaaaaaacgaaagatttatctctttcgttttttgtatataaagaaaatgagagtagttgttacttaatttgactttctatttctaatttcatttttttccattacactacatagttttgctaaaccataaaacaaacctattacacaaaaaagtattaaaaaaggtgtaaatttttctacagcaaaatcccgcatgatttcttgggcttgctcgggttttgttatgatattatgcctgaatgtcaatatatctatattcatttttacagtagctacacaaacaagtacaatgggacataagatagctattgccatcattaaattgttcaacaaaaattttaaaagctttttcattatgatcctccttgtaatttatattttgtttttataatacactcttttatttttatttatatactttttatattgttgtgtactttttactagataataaattgaaaagagaagaagtcccataaaaggaatgatgctagaaagaataattctagcaataagagagtctagatccgctagatacatataaatgaaacttccttgtatgaggataattgaaagagagattataattatatgtatgtatccagtcctttctttttttaattcatctagttgtctataatattttcgattactaattttcggtttcatatgtaccctccataaagaaaatacgaaagcatttgaatagcaagtaggcatttgcctacttgcttttttatgttttttcttttccggtgcgtccagcatgtgccttggcaaactcaggaggaacttacagagagtagcgtgagcgtactctctgtagttatccctgtgtttaatgctgtgagcgacacatatctccttgttagcttctgaaacgcctgtacaggctttcaggaggttataaggagtaagtgccaccgcccaaaggatctaatgtttaaatctttaaaattgaattaaattctacagaataactcttttattcaatcctcatgcttcactttattttccatccatcttgctaactcgcttagttgaatatcctctcttttaatatctgtttctgcaatatacggttcgacaacacaattattcaatttactatttaaattaatgtcaagaggattaattgtagaggttttattttctagatttaaatttattattttgccaccaaatttttcaattattttattataatcagtcataagtttatccattgttcctccccatttcttaataaaatttaaatttgattaaaccctactatctaattcagtaggcttcaaaaatcagcgcaaaaaacataaccataaaaatcaaaaatatcaaaaaatagacacatgaaattctcatatcatctttattcatattatctgcgcccccttctttgtgaagaatttcgaagcctatttatcttttcttttttttcagatttgtgattagttgaaccgaataataaaaaacgcaaaaggaaaaacattgcgcctaaacctaacaagctacaaaaaacattccaagaactaagatccaccatcatattattttccgcctttttttctataacattcaaatttgattaaaactctgcaaagattcttctatttattgttcattttcaataatgtaatatccttggctagaaattgattttatacgctttaaatcatcaattatccttgcatttaattctactatggttctacttcccccatttcgtccatcgagatcatccaattcccatagcaaacttttctcaccatcaaaacccttaaattctgggttaattccttcttttaaaacttttatggcatcttcacaagcatgaactagatcttcaggagaaactaattctaatttctttgagtttggaggttcaaattgactatatatcggaatatgtattccataatttgcgtatacagctcttaatgtcccacttgttgcgtaagtaaatcttaattcgccttgatcaaaatatcgtatcatctcattaaaatcattttcttcatgttctacgatttcaaattgtttgaaataagtccaagttactcccataaattattcctccctacgttttatacaaaattcaattgtccttttcaatcattctctctatctcctagcttaaaatagatttaatctacgtatttaaacgcaactggggaagctgttaattcaagataaggaagctcattcgcttttgcttgtctacaaaactctttaagaagtgtcattccttcttcgatacttaatattttgtagaaattactgtttatatcatcaataaagaattcaattatttcaacactatcaaataaagagttcgagtctatttctgtaattaacttctcattgtctatatcaatttttacagacaaataattcgttacaccatcaagagcatcctcttcaaatttatgagtattaaatttaattgtcgcatcaaaagaataatctgatttcaaatcattataagtaaaaccatcccaattaaaaatatatccatatgctatcttcttattttcccctttactttcttctatataattgacgtgttcttcagtggaattttttttattttgttcaacatcatccaattttctaatttctttacttgctctccaataagaacgaatagctgacattgcatgttcttcatcaggtacgtttgctatctttaggtaacatttaccctgataagctattacaaattcaccttcaaaatcccacttttcatcctgctcaatttccctatataatgaataatcatctccatctctaccttgaattaaatagtttggtattttaaaatttaatcctttaaactccgcttcgggtggtacaatcactttcgtagttactgtatccatgattcattcctctccttttccaagttgcgataggtaagactttgaagttatctccatcttttcccccgcttagcactgtacgtgcgactttcatcgcatacagcgccccatcttattcttctatcctaaagcaactagattacaaacaatgttgtactcaccaacgtattcattcccttttcttacgaaaagtcacatcatcttactcgatcctgtgagttacatccagttgatttagttttcaaagaacaagactagggactatccctccacattcgttacatgcttcgtcggtactgtgtccccaccttcacaagaatgaagcaatttcggttcgttagaaccttatatgcatctgtccactagtagacgttcatgacagtttcttgcttaccacgttccgattgacctagctatacatatatccttaggtgcttgctttaagcctgttatctttacatcctcattgttagatgttccgaatttcatatcatttactcttacttttcggtagataacgtcgtcattgacgacatacacatttctaatgtattaatagtttagacccgtacattcgcaagttcgccagtccgttaggacattctcaccttagatattttgtagcatcccgacctatccattaccatatgatttctcacttaggttttgttcagtcgacttcacctagcttcatacaatttgtgactactatcacgctttgcatgtaggagtatcagataagtagtttcagctcaacctgacggctttcattcctactttcagtcaatcagttgttgttatcaaattgataaccctcctatttcgtgtttgcacacttatgaggaaacgtgtcgcacaaataactattttgtttaaatttcatgtagttcgccgatataagctgtaacatattgaatatgagattcttgattattttttccgaaacatgtctctattcggtctatgcttatacttggaaatctttcttccaataagcttatcaataactttttattagtatcgttatctactaattgcaattcgttatcttcttttataaggacgaatccccgatcacgtaattgttggattttatctacttcatcttttttatctgatattggttttttgctaaagattctgctaagtctggttaaactaaaagcgaactttacattcaatccaccatactcagtgaaggtcatttcagaaatatgattaaatccaatttctctccaccagcctttaattttattagttaatgcattaagttgttcactcaaaccatcaataggcttcatatcagccatctttttttctagttctctaatacgtaaatttgcattcctaagatcattactacgtctttctcgttccctagccaagtcagattcgtaatttgtttctttagctataactgaaatatgactttctgataaagaaataagtgtccccttcatttcctctgttaacttatcttttgataaccattcatgcatttgttgtgctgtaaaatataaatcttttaatctctttaaagtgaccgccttttgatcttcattcaaaacaactaatgtttcttggtttcccatctctcattctccttttctcgttttcttgtttttgaataaatcctgtacgctttttattttttttatctttttttataatttctaggtacatacttagatatatttcattcataaacttatctatttttactccctccgatctcgctttaatcattgaaagatataaggaaagtctattaaatttgtaaccactcttttgtgagaattgtcttcaataaattaaacttagaggtctttttatcaagacaatgtatgttagcacgatccgcattgtacccctttatacataaatgtatcttctcttgaaacgaatcagttttagtagatgcttcgtatataacctcgcatccaacctctttattgtctttatataaaaccacagtgtaaatgttaagaatatccttcacactgatccctcccttaattacaaagtaatgtaacaatatctactgctgtattatccgctacttgataatacatttctaagccacgtctttctgattttaatactctcgtactttttaattttgctagatgaacagatacagtagattgtggtatatctaattgtgtttgtatttgagttacattgctaatcttacatgaaataaggtatcgtactatttgaagacggatgggatgccctagagcctttagcatatctactgatttttctgttacagtttgtaaatttttttctactagtttcatattatacattccttttatattaattttgtaatgttgttaactaataatcttgtaaacatttgttctataaaactcttaatctattaaccataaagtattcatgaatactttatggttaatagaacctacaatcttttaatatcataattacattatacactaaatatagtttaaaataaacaactttataaactgtatttagtgtatttttagtgtcataattaaaaggaggagatataacctcgtccttttaattaatcacaacttgagctattgtcattgctactatcattatagttattcgaggaattatcaggtgaacacatcccacttgatttgtccgatccattatcattgtctagtattatgttattaatagtgcttgctgtgattaagggatctactagatcactagtatttctatgttttttttcctcagtaaaatgatgtacgtgtgattgtctattggaacgtctaactatattggttttgtcgctagatatttcaatttcttttttatccatgcttactttacaagatttcaaatttttatctttcatataatttacaactttatctacgtcttttcccataataggttcttcctcttgtttaaaaaagagcgacaatccttttgtgaagaaatatcccattaaaacaaccaaaccgagccaaacaaaaattcttattagtaaaaaccaatcaaatgctagattttccatattttcatgctcccttcatttgaatcttatttacacactattcgaattcatcaatacggaaatcctcataaattttcggttttttcatagttggcctattcccttcaaattcaacattatcagaccaatttatttttacttttttataaaattcttctaactcttttgatgttaaaagagacaataaaaaacacaactcactttctacctgaagtaaacctgaagtaatatatcctctttcatattcactttttttacctgcattactaataaaatcatgcatacctattaaagcaagcatccgattagtaaatttaccactgttttcatcgttattaaaagcttcatattttgcaaacatataatcattcctttttatagtgttcttaatcttttatccaaaaatccatattcctataaacaaataagcaaaaagcgcaaaaacaaatgcaaatccaaacactagacatttaccaaaggacatacttttatgatcttccactgattatttttcctttcttaatgaattttattccgtttctagcaataacatatttttaataggggattctgtttcaagttctttcccatcccttatccatataacaacgtcacgttcactatctaaccctctgtttatagtttttacacatagggctacaccttcattttttgagatgatatttcttacacgttttccttttatatcaaactcttttttcatattctcactccgtcacattctctatagtcccaataaacataaagttgacattatcatatttgaaaatttctattttattaactccttcttcatttacctctagataattacataagatggtatttgccatataaccagcttcctcttggttttctaatagatagctatcacaatctacaacagtattatccttctttgctacaaatgaatatatatctttcaaaataattcatccctttctccaaaatccccgttttttttgatataaaattcaaacactaaaacttttggcattctccattatactaagatttaatttcattaggttttttaaataaaaatcgtaatacaattataattgtccaaatccaaagtattactttaccaatattaagcaatagatatgttttattttgcattccactaactatatttgttgatacagtaggttctgtataaaaatccagtgaaaatagataagtaatagcttctattaatcccattctagcctgtgctgggaacacccaaaatgtcatcggtattacaaaaaacacaccaatccaaacaacagccccccaatcaatctgtttgatattatggataggtctttcaatcaaactcatgttatttatttttttcatgttcattccaccttttcaaaaaattattttataaattgaagaatacaaattacaattaagcaagtaagcattgctggtagcataatttttaattcatccggtaattctttctccaaaatagcaaatattagattcactattattgccaaaaatataaatagagctaaagatccaagaaacattattggtatgattgataatgaattcatttattttctccattcaaaactaattactttttatatcgttataccatgtattgctataagcattgtgcctgtcagatatatcataaaaccagctaatgcaaacatcttaagaaattcgttatttttttcactatgtccattaagcattctataaagaacactagcattaaaccctaataaacataaagctacaggtataccaatataccactttcttaaaggagcaaatatccccgaaaccacctcttgtatagccatttcattcgttaatccagcttgttgtaataaatcacccattgatgataaagcaagaaacattaaaaccatgaaaccaaatatactaaaaaacttactcattttatatcctcctagttccaaataaaatttgattttaagagagttctttaattctccatactccctctagttggtacttgttaacaagatattttaagaaatcaaaataactttgtcccgattctttatagtcccatgtttcatctaaaagggtagtaattacattaatttgtcctctaacgaaactggattttacatgatatttcccatcattttctgatttttctattcttataaactcattaatccgttcagtaagcatttctctaatagcttttgaggatagtataacttccggtatttccatactcatattttctaaattaaaatccttagcttcttgcttatgatatttaacgttcttattagggttttgtgcattataaaactccctattgaactctcttagtttattcaattcttcatctgaacaatgcttccatatcataccttcatctaatatcctttttttctcttcacctagaagtcctcgatcccttatctctttcaccatattttctaaggcttccaacatatcgtctactctcattttttgacctaaaatatctctattattttcaagaaacctcatgtacctttctaattcttctaatttcatcaactcatatcaatcctttcattttttatttaaattattactagtaaatacaccttcagcttttaaaaacctttcaagagcatcatataatttcatttcgttgctattacaatactcttcattgtcgtgaagaacgcttgcttcttctaatgtatccaaattacgccataattcataagacaacttatgtactttcttacgaatttctttaagatcaacagcttccattaaaaccactactttcataataaattctaaaactattaattttttctatttaacgccttttccaaagcattttaaacaaggaatttttatacctgtttcttgtaatccaaaaccaaatctatcttctttgattgaataactcttgctaaagacaaacccttttccattacaagatttacattttctaactctcatttctcttatccctccaataagtattcttgaatacctccgtttttaaacatccaaaaattcgcttatctaaccgactatcttattatatcatattttattaataaaacaaatatagtttattgataaaaataatgtaaactacatttattttaaaggggtgggtggtgggtattgatataaagaataagcgtagcttattttcaatgcctttatataaaaaatgagaacaagattttctatctcattctcattttttataactacttgatatattctccaaagctaaatttttcaatatacattttttaagcataggcattacaagttctaaatttaaaaataccataaataaaattttgtatgtaggaattgaaaattttacaagtaccgtccataacaaattaagaatagagtttgttacagttgtatttgtcacatggttaagatccaccaagaaacggtctattatctctacattagagataggcattacacataaaaaaataaatgacacaaacaaagtaaccacaaaaggtttaaaaataatattagttattgtttttggtaagctaaatataatgaccacctactttgttaattttttattttgatatataagagaataggctacattgtaacagttattccctatcttatatcttatttattatataaaaaacatacaataaatatagtttaaagtaaatgtttatttaaaacacatttagttatattaataaataaaaatggaatcattagattccatttttatgctcgctttaatcttttcttcggctctttcacagttctacttaatacatcaaaggcttcttgaatcatttgtttttcatcttcttttctttgtaagtacaactgatactcttgaaccaattcttccgcccaatcttcaatttctttatcttggtttggttgatagtccatgacattactgaatacaggaatatcagcatatctttcttcataattaaattcatcggctgtttcatcttttaattcataaacaaatccttttaaaacttttttcccgttttccatatcatgaatcaactcaaccataatttcggttttttcatcatctaaaaatacttttcctaattgcattattttacactccttttaaaatagtttttctaaatctaactctaactgaaggagatcactttctattataaatgaatcttcgctttttatatattgtccaccttctgtaagtttgtaaacatatgctttgtttttgaactgatccagtatccaatattcctttacaccattcttttcatataattttacgttctccactagatctttatccatattagaatgagataatacttctacaattaaatccggtgcgcccacaatacaattttctcttactatattatgatcagaaacaacaactgaaagatcaggttgaggtttggcatgtccaaaacgtccttttacatttcttaaatagacagtgtagggcgcaaaaatactgacatgcttcatttctaattgttttcttaattcataatatacattccctaatattaattggtgctttgtactaggtgttttatgctgattgaaactcatgtgcatattcccccataaaatcattttttcatttggcttttcatagaaactttactttacatactaccaatagtataattcttattaagataatagcaaaagacaagttgcaaccttgccttttgccaatgctgtttagagtgtgagggtcgattcttgcactcttttatttatgttcaatgaagtccatatacatttcacatttcgggcatttctttttgggtatgatttcactactccaatcaccttccttgcattcttcacacacgtattcaataaaaataaaatccctatgctcgtgttcctttttctttttattaatagtgatattgaacatatgcatttgctaaaaaccccaagtaatgattgatatctctattataaaaatctatttttcgtatttgcttttcaattactttttgttcttctattggtgcttgtttaatcatatctataacaatttcattttcaattacatgtgtaagtcctttatgtttaataacaaaaatatcacttggaatgtgcttttcttcaaaaaagcgttcaataaatgtacgtgatctttcttttactgtatacatattatctcacctcctttttttgtccgtcttcaaatcctaaataacatgctataatctctaattttcgattcatattttcttcccctatccattcatataattcttcttcaatctcttgtcctgtaacaacaatactctcacgttgatcgcacatactcgcaaacaattctatttgttgattcgtataatccatagcattatcccattcggtgaataaatgcacatgctgttttgattcttctagattccataattcttttacaacaataatttctgtatttttcatagaatctaatatataccctacatgccattcttgatttttatctgatttgaaaattaaatttacttctccatcataaggatttagtttaataaccacgtcctcattcatttctttagcaaaagccttataacaaaagaatccagcttcatacttttgatatacaatgtcttggatctcaaaagtattttgtctttccataaattcttttagatcttgaaagatttgttcttgcatgttttttaatgttttcatgttttttctctccttttttttgcatttgcattacgcaaatgatcttcccaaagggaattatttttgccatttgacatgaagcatggaacatccgcataggaaagttggcaagggttttagctgaaaaaattttatgtccgaatttttttcatcggaataaaaatttttcagccccttgccaattttcctgaatcacttagcaaaaaacaggttaaaccgaaggggaaactttgacctgttttttgcttagtgattctgcggtatgttacagtgcgtagtgcaaatgcaaaaataatataaataaaaaaagtaggcgttagcctactctccgcttttgatcttttgttttttccggttcgtccagcatgtgccttccttggcaaactcaggaggaacttacagagagtagcgtgagcgtactctctgtagttatccctgtgtttaatgctgtgagcgacacatatctccttgttagcttctgaaacgcctgtacaggctttcagaaggttataaggagtaagtgccaccgcccaagcctaaaaaagcacttattctcccttttagaaagaacaagtgccaatattctaattatttatcataaaaaatatctaccctacttaatcattaggtatttcaacagataaactcggttttgctggtgatggtgtttctccaccattaagtgacgcttgttttaaactactaaaactattgatactacatgctaaagtacctactaataccatgcctaatacaattttctttattttaatcattatttcaacgccccttttctcaaatgtttcttgtctgcattgttactgatataaaagtatttacttgctttaacatgatcatcagtttcatagaattgaatggccaacatttcggcatattcttttacgcaatcccacattccttctttttcaaaataagaaattgcatctgtaacaacttgttctaaacgtgctttaggtaattctgtgactaattcatttataactgcaaaacgatgcttatattctgcatttcctgattgaattgcgcttttcattccttgttctatatgttgttttgctgtttcaatatcacctaatttataatatgctctcgctagaacaaataatgctttataatgattcggaattttatttacgatttcagaactatgtcgaatagccaattcatataaatcttcaatatggtataaccatcctaaattgtaacgtacctttattaacaaatgttcttcatcattctttttaagaacatctattaccttattcagacattcttcagcccttccgaattcccgtaaatctatacaagctatactgtataggttatcacataatgcatgattgatttcatatcctatatgatttgaaaacatttctttagcctttaatacatgctgaataccttcaaatggttggtatgaatgatagtaaaaacttgccattctatattcaaattcagccttttcgatttcatcaggaatataaattaaaagttcttccgctttatcataatgtgcttttgcatcattgtaattggacaaaattgtagaatgtattgctttaaagaaatgataatagtaagccaaaaataaatattgatccttgattcccgaaagttcttctaccttttcaaacgattcctttgtaatattaattccttctactaacactttacatctaaaatcaagtagtgaataatagagtgaaagatattgatctgtttcaatttcttttaaattttcttctattttcatttttaactgattggatttctcgacatgatacaaacggatttcttcataccattcattcaataatcttattaattgctctcttccttttgtctgaatgctcataatatcccccttctttctatatacagtcttaattcgataataacaggaattgggtacaatgaattttactacaagatttctcataaataaacagaatattctgaaataaaaaagacatatcctatttttttatctagggatatgtctaaaatgacgaatcataactattataccgaattctagttgtttataaaaacattatgttcactttatattgttgctttgaaatattgattaaccgtcatgtataattcatatacagggttatgggtaggtaaatattcaaaaaaggatggaagaatgtatatgataaaagaaattccatttcaagaaggcgaaataattctttttaaagaagcgaatttgtggaacgatttgcttgaaagatgcaaaaaagaaacaaaaacgattaatatagcaacatacaattttaattttaagaataaatacgaaagatccttttataaggagttatctaaacttgctaatttaggaattgatgttagcttactatattcaataatgactttttctaatgaggataaattagagatagaagaaatatttaaaaatttcgtgttgtgtgcacagctaaaagccaatcactcgaaaatgtttattacagataatttcgcatacattggttcagctaattttagttttagtagtaataataattacgaatgtggtgttatttttaataataaagaaattgtttcaaagatacggaaactattcatgggggaaatgcttgaacaaagcgaattcacaaatgtccctacatcttttgatccattttattttttacctagaatactaaataatgttgaagaattaagtaaagtagaaaaaaaagagtccttgtatattgctagtaatgtagaaaacatagcacaattgcgttatttagatgatttagagaaaaatttaaataaactaggttttccaatacctatacattttgattggtggaaacttttttgggaacttgaggaaaagaaaccaatacctgatatcacatttaataattttaaaaactatctctatgcattatctcaatacttaaacactgtaatagaacatgttaacgcacagtatgagagcatcggaagaatggaattactgaagcgaattaaagtaataaaataaaatatagacttgaaataaagatcaatcaacctttatttcaagtctatatttagataaaacacctattttgtttgttccgctttaatagtagaaataagagcgaatgtaatcacatcaaataatttctcagggcaattggaaacgaaatgtgcaatcgcaatttctatcacttcgccaactgtttctacatcttttgctaacattttgattctttgtctttctgtttcatcaattctcacattcaatacgactcttttatgtgagacactaacttcttgatggatgatttctttcaattccttcattcttttactttgtaaaaacggttttaatgatgctacattatttgtctgtttaaatacatcatcaatcatcattttcaaaaactcaggcttattagtcgttgataattcagtaatggtagggtaattaaaatgttttataattagaaattcagtaaacttagatctcttatatatcatgtaagttgcaaggaaaacataattcatgacaggatctattttgtacgatttgttaggtattgtattgtttgtatccatttttcctacctctccaatacatataaaataaaaaaaggaaacaataacgagttactgtttcctttaacaatcaattagttcgataaaaatcaaaggtattataagcatcctctataatctcaacagtaacgatatctcttttgataataccatttttccatttcgctgtgaacatgaagtaaatattacctttttctaacttcgttctcggatcagtcatggatggttcaaaaatatcaagattatatattggatgacttgaatttaaaggctttctaataatgagatcctgtttgtttacttgcattcctttgaattctaatgtaacaaattcaatcggataatttgttacaatggctgacgtaacaaatttttcccctgatacaaattgctccggtaaatggtttagctttttatgaatttcttgccactcttttgtatgatccactttccctttaatactaagtggttcagctttaaaagagactttcgcttctcccttttcaccatgaggatctgttactgttgctttaaattcatacgatccatcttttatcgaatctattttatattgtaaggtcttccctgatatagctttcttttcttcaaatactttcttccagtttccttgattctctttcatttctaggataacttgtagcttttctttatctctaggatcttcatcactcggtaacatttctaaagtgacattatctccttcaaatactggattagggttatatttcaattcaattttaggtactgtatttacatatgggttagtggaaacttcattgtcgttttcatttatctctttaatcacattttcatcgtctacttttgctcgaaatgtatgatcccctgaatcttcagccttgaaagtaaaatattttgtagccttttctccttttttcatgctcttaatatctattgtttgtagctttttattgtcttggtaaaatgctattttaaatgcttttacatctaattcaccatcattaataaagtctactttcgccttatattcttggcctttaactaaatgattaatagctttgttatttgaatctaaaatagtaatagattgcgcttttaagtttgtcgcccgaatatctccaacatactcaacttctacatcccattttccgcttgtatcatactcattccaatgatcaaatacttccttagaaagtttacctttataagttgcttttccagtgaaatctttgagaatatcaggcaagttaaatgttcctctatattcctgagcatatctatatccttgcacttgctttatataatcaatccatacacctttacgatatctattagtcctccccgattctgatttccaacgataaccgaactgtgctgttttataatgccatcttggatcttcagcatcttgtacgtcccattcatcccatccccaatcctcaactatccaattctccttatcaggctctaatccgtaatatgtatcaggtttaaggggtttagaatcactgaagttatacatatcaccataataagtatacgggttatatgacataaatcctaaacgactatttccagcaccatcatagtattcagctcgtccctcacttcggctctgtatccacattcctttagaatccaccgaatatttatcacccaattgaggaacttggaaattaagggtttgtccacttctttcatcataatagttcttcgatatactagatggtgctggcgcttgccacgaataccttctaaatatgttgtcttcccaatgtccatctaggttaacagttctatttgtttcccaattttttgaccactcgacatttcccactagagggattttcccttgatacccatcttcattaattgtcacttcttttggcactaacgattgatcattagtatggtaggtattactaactgtttttgtaaactctttggtttctgtgcgatagatactatccttatgatgtaccttttcttttggtgttaatttaatacgtgtagcctttagaataccggtttgaccatcttgatcataagcgatgctatcaggataatcaccgtattcttgatttggatagggaacaattttcggattttcccaacgcatatctttctgaatttcaccataatgtatccatcttgtagtttgtttttcagcatgtgcttctttgacaggatattgaaatatgctacttactatgagagaagacaaagcgatttttaatactttatgtttcatgatatctcttcctaacttttaaatttcacttgttaaaataaggagaaaatttatatccgattgcaaattctgtatattgatcggagcattctttataagctgataaatctatttgctcgctaggaggttcgatattaatagtaagtcccctgttttttaaatcttctatatcccatacctccacttcaaaggcaatatccataataggtgtactattattcatttcttgtttttctagcattttcacttgaatactcatagttacatttttatctaattcacccttattaggattaagttcatatattttttcagtgtattggacttgattctcctgataatttttttgagaatctaaaaggaatttttcagcatgataatagattactcggaagatccgcactcctaatgacatgttttcccataataactttgagtgtagtaataattctttatgacttccatgtctagaacggattgcatccaaacatactttatatatttttacttttgatagatttatattttctagcttagattccccaaattctcggaaagttgttccttccatttcgtatatatcaaagaacatagatgcataaaaaataagttcatctaggtttagattcttatcaaacaaactttcaacaaacataagaacaagttctattttctctaaagataaatttgttaaaatatatttctcttcagtgtagtccttgttataaatacgaattcccttatatgtatttccatatagccttttaccttttaagaaattttgtacaataggtaaaaaaggattgtacttctccattgccttatgaaatagatcttctatttctcccaaaaacagagggtgcttatctttcaaataattatataaatccccttctattgttcttacctttgaaatatcctcttcagtgtattccagtacatttctttcctcttcatttaattgtgttttaaaaaacacctgacggataacagaaggggttatatgtgcttcttgctgtaattgaattacaaagttatcgtattcatgaatactcattgtttttgcctgttcaggattttcaaaaaaaacactggtatatttcatttgtttattctcctttattctttaatttccgtactatagaaggatttgtttattctttaatccgattctaaatacattcatattcttaacatcaatatcatgaagtaataaaaaagcttcaaacttttcgttaggaaaagaaacaataatttcaacatcaggcaagtgttttaaagatggtataatctttttaatatctttgactttcatatctttatttacatcacaaaacaattgatacacattaaaattatcattttcatttttgataataatgtaacagtttccatttctataaccttttactaaaatatcagattgaataactttcattttaataccccttagaaatttctatacagcgtatttttttatagcttcttctattgttttagcatctttttcttctgaataatctatataagctggtattaccttaccaatatttaataccattagatcaaacctttgatccgtagtttcgttataaaagcaatgggaataatagatagggatctcatacagcatccaaccctttatatcaaaccctttctcttggatataagtaatacagttatgaaaacgaattaatgaatcatcctcatgattttttttattgaagtaactcccctcttcaatttcttcaaaatgagaaatatattcttctatttttatctttatatagatattcaagctatttttcagtaattcttttgcaatttctatcttttccatataggataccccttatgatttaatagtttccttgctcttgttcaaagtcgaatgctctaccgatagattatggaattgttgaaatactgctttcataacatctatgtcttcttgatccacttccaattcttcatcaggcgatacaatttcaccagtttttaaccagcccttatacattgatacaaacatatcaatcgcttcttttgtattttcttgttttaacgtgtcccataattcttcatcaatttgatttataaaatgatctaaattgattgcttttgtttccctatattgattaacaagcacttcttttagtttttctaattcgatttgtgacaactcattaagatcaaaatgatattttagccaatgatatccttcagggatatattgtacaaattttaaaatatcctcttctttagaaaagtcaaatactatataacctttccctttgcaagtaaaacaatttcctttttcctccgctaaatcttgtaataaaccagctaaacactcttgacattcacagtctattttcatagttttcctcccaactttgatacattaaaattaaaactctcgaatcgagagatttaacaagtaaatctctatcttccaaagttctagcttacttactgatacataaattgaatggctaatacaccgatacgatttatcttatttttatcatcccaataaatatttacatcagcgtacttcccattaaaatctttctttattaatttatcaatttcgctataatcatttgatttcgtttcgtaaattgctgtatatactgtatctactccacatcgtacatcttcaggtattttcttatttgcatcttcccaaagttccaattgatatatttcctgtttaacttcttctactgatttttccttttttgtcatagcttctaattgttgatcaaaatactcttttttcacaccatcataacggttaaacacacctaatttttttcttaaatcgttatttattcccgctttttctggtggggctatataaaatttactttgagtttgctttgtggattcttttgatgctgtattatgatttacaaaccaatacaccgaagcacccattactattaaggccatacatatataaataagtaatttacgtttcatatcctaaccgtccccctattccttattaaagaagcttaatggattaaggacttgtccattcattctagtttcaagatgcaagtgtgcccctgtactatctcctgtcgatcctacatgtccaataatctgaccagctattacttttgcatcttttgatacagtaatagaatttaaatgtgcatatctagtttcaaaaccattcccatgatccaaaataactagatttccatatccacccatagtaccagcaaatgtcacagttccatcttttacagcccccacaggttgattcataatattaggcgctgatatatcgactccgttatgtttttctacctttcctgtgattgggtgaactcgttcaggattaaaattagaagttacattttgagtaaatgacaatggaaatactaaccctttttcatttgcggtaacgttttgtaattgtcctagattttgatttattggattaggagtctttactttatatgtgtaagaagcaacccttctaacaacccgatcctctttacttaaaaaatatttctttgtagtagtttcaattatcgctactagggtagggttttgaaatgtatcttgaaacttcagggtattcgctttatatttcactggaaatttggagttagattgatcaagcacttggaattcaaggattttataatctgtcccttcttggaatccagtgttatcttttaaactttctttaaatgtttgttttgcttttatagggtcaaacactagctttccatttgcaagttcatcttttttcaattctaaacttgcatcatgtacagctacctctagatcctcttttaaatacttagagctttttgcgtatgtggcaatattcatattcaaagttaatcccataacagccattaatacgataaataaagttctgataagatctcccacaatatcactcttccttatgtagtccctgtatattcgcttctaacagttctcttaatcttatagggcttagaattatcaatcttaaatacatcaataactgttaatggaggttgaggaatttcaaactcaatataaattttttcccctctagtggttactgtttcagttcccttaatttttatttgatccgctttataatgatggatatttacaagatagtccttcatttctttatataaagctgaatcatatttcccttgtaaacttgctttcttttgagtctcatatatagctaaattaatagtttcatcgacttgggatgcattgagaaataaagctggttgaaaaattgaccaaaggattaatggcatcaataatacatatgaaagaacttgattcatacgcacacccctttcatattttaattatttactattaaaagattgcttggtaaaagttatttgtatacttttctagtaagttcttatactcttgttcttctttttctgtaacttcaccaccctcaccataaatcttggaatacaacattttctccctcttttcttcctcttcagatgggaaaatgttaccttccgcaagctcaatgaattctattaaattctcaatttctttttcatttaaagattgttctagatcagcgcaaatacagaagtaagctaaattccaatgttctactttcaattgaattccacagatcggcaaataattaaaaatctctagtaaatacattctttcctttgtatttaaattgttttttccttttttaatatgttgtttaaggttacgcactacctttgctttgacaacatatcctgtatcttcatatcctgtagaaagttcttctaaatcagccatcccagactgatttctatattcgattacttgttcagcaattgtcatagggatagctaatgcgcacacattttgtctttccactttaaacatatacatcacaccttcttaactcttattattctcaaaataatgttctcaaaaataatgttctcgataaaatgttctcaaaaataatgctctcgataaaatgataatccattgaatattcaatggattatcataaaagtttgctcaatacttatttttaaatttgtagatattaaggcgctactttagtagaagtaatttgtttctgtacttctccacctttagtttgaactgaaggtgttaattgattccatacaacagcaccaattatcacaagtgttgcggcgattaataatatttttgaaattactgattccattttctttttctcctttatgatttgaatttttattttacttttgttccatcaatttgagttttaatttctgttccttttccttgaactgaaggtgttaattgattccatacaacagcaccaattaccacaagtgttgcggcaattaataatatttttgaaattactgattccatgcacattcaccccctttaaatatgactttttcctaaaatatcattaaacatggcaaagatataaataactaaccatgatatgattaacaaacttgttgtagtaaaaatcccaaacattaacgttttgcgttttccactctgttgcatttgtgcttcatagtaagaaaaagcaaatacgctagattcagcattaattgtttctaatgcttgctcttttgaagtttgatccattttaaaaataatatctcctaacgcttttgttccttccccaccaatatcctcataaaacacatctttagctttttcaggatcagatttccataatgaaagaaatctagcaattgtaccgttaatatgttcaaacattggtagagagtccctaataattccatatatattaacttcttgtgaaggatttaatgaatataaatcagcttttaaaacatcaaacaatgtaaatacttctgttattttcttttgatattttaatgttattaaataattaattatcatcgagataattgagtatttaaaaattggctctgtggctagatatatactccaaaccacaagtaggctcattacagaaaattctcctagcgttacatatggaatagctaggtaatagattgccaagaaaagtaatactaccattcttgtaatttgataatgagaagctttaatatacttaatttctgcggttgataatttttgctggaatttcgatttattattaactaaaatgaactttttcttcttttgttggatactttgagcaatttttgttctttgtaattttcgttcttcaatagaagtacatagagcataagtttgatatgctcctattccaaagaatatgagtaccaatagatagacaaacaaacttaccaataaatctatagacacatcttttacactcccatctatttagcaaatgtatttaatatctaaaattagaattatacaatttaggtattcaagaatactttaaggctgtaatagttcctattttagatatcggctctcggtttactcataacaatggctgtaaggactgaaaagattgacattactaaactaatcgtaaatagtattattggtgttttctgttggaaaacataccaaaaatctactactcctgagatcctatacgctaaaaagatcattaaaggaaataagaccattggtgaatatcctaaaattactgtttctaattttcttgttttatcagtttggatatcttgtttccttttctttatatcagcatttaaatccattaaagacatagtgatatcaccacgatctatatgtgctttctttaataattttgcgaaacgtttcgcaaatgttgaatttattgaatatgaaaatacatttactgccctttcaaattctaaattccctctatccttttgaagtgatgataatagtttcatatagatatgctttaattctttattttttgtttcttttacagcatttagcattgtataatatatatcttttgaggtactttgataattttggaataaaacatgatattcgattaagaatgcatactgtgtttttaatcgtaacattgttaatctatatctaattgcaacatacggtaagattccaaaagtaataccaatacctaaagcaaacactagatcatgaatcaaaaagtataaaactgaaacagttattacgaaaacaagcattgatgcaaacaagaaattaaacacatttatttttttactatttttagagatactcgaaagtagtaattctagatgtttaacaaatgggtgtactccgtcattcctttttgctgtttgatgtacttcttcccatcttttaatttctcgtctatttttccatcttctaaagttcttttctaactcaccttgtaagaagggagcacctaataaagcccataaaccataaaagaatagggagtatccaagaatcttagaaattgcttcaataaacaaaatcatgcttattcactcctaaaatataatctcttcttttatagttgtagttattggtgaacgttcacttctttcttgtaataattggataaatctttcagcctttttccgatctacagatttcattttctttatcagtgcttcggaaacttctgaattgtattcccatctttcatccagttcattatatttcattaaatagttgatccaagctttatcgcctttatagtcgtaacaaatttcataaatactcattaatctcttttcattttttggttcatcatttttcataataatgccaagatctaagttttttgctactcgtctaatttcattttctagctttctatttgcgtatgcatcaacaatatgttgtgctaattgttcaggcgttctagacggatcagtaatatgataggtcatcatcattccagttgtccctctttctgcccccttcatagcaccatcggcttcaattccacgtacctcttggaagattatgtaatcatgatctgttcttaaagccgaataaattacatcttcaatatttccattaatggtatacatgtcatatacgagtcgatcaggaaaatctttttttagaaaactttccggacttgtttcaatacaaattgcaatcttttcaggactcctactagcaaatattgtttttaacatagtagattttcctgattcaacatgtccagctataatcatattaagatacagctgtgatatgatttccattagttctacatcttcagaagaaattgtttttcttctcgcttgttcctcaaaagagaagtttttaattataaatcttcgaaaaacaattacagggaataaatttgctggtggacgaataatgttaacccttgttccatccttcatttcgatttcagcccttggattttcatgattaattttcaatcctttatggcctacttccaatgcacgaaaaatctcatagatatgttcctcgtctcgtaattcttcttcttgctttacaaatttaccatttattttgaaccatatttctttaccgatgatagatgctgatactgattcaggatactttttccacttataaaacgctccgaatccataaatttcatggaatagcgcttgagcaagcgaatcaaagaagtcaggatactttacatctagtagattctgttccctaagacacttttcaatttcttttgttaaaatcttttcggcttcatgatcacctaaaattgcattatgctctatttcttgcctttttatcttttcatcggaactaatacctctgtcttcatatatattttctatactttttttgacgatttctagtacctctgagaattcatgcgtttgttttacacttttggctttttccacagtgtaattaataacgtctgccactccacgttcctgtaaatgggagtttatatcaaataatttcggtgttactgttgacatttattttacctccttcctttttttacaggatgccaaaaaatttccttcttcttggcaattgaagttcatcattaaaaattaaatcaacactggatgcgattgacttagcaacagcattaattgactgtttgtatccgatatcttcataatcataaagtacagttcgttcaatctcagaaagcataccattttcacttttttctattgttgttaataatggaatatcaatatctttatggatatcttttgtagtaggcaaatgcgataagtcttcgaactgattaataatcattaacagatcctctttttcataaccaagtggatataaaatatcacgatgaaattgattaaattttcttattgcctttgtttgttggttcataattaaaaatcgtaaattactctcatttaatgcttgaaccatatttgcattatcaaaatgcgatccagcatcaactaagactacatcaaatgtctgtttagagtgttcaattaaatagttaatttcttctttagtaaataatctttccattttagtatcacgattaccacctaatatatataggttgggattaaccatatggaattgtgacagaaattcctgttcagaactaatggttttagatgctaacttacttttaacctgatccatataatttcctttaaaatttagttgatcagtcccactatcccatgcattcagtaataaaactcctacttttgcatttgtatattggcttaacgcttttcctacgcttaaacaggttgaagtagtacctatgttagaaactgaagagaagaaagttatgatattagttttctgtaccattgctagattaagattttgatcaataaaatcaacaatttgttctactactaatctaggtggaattaaataaatatccttactattacaaattgcttttactgtactttcaagttgaggtttgtattgattctctaacatgtaaaatacctttttattttcaaactctatagtagataattcactataaggtaatacacgatctgaaattaataaatatccatctttactagacttttcaacatcattaatctgttgtaccgaagtaaaaacttttcgttctttaattttattaattagcgcttcatcggaagacattacaaataatttcatatttgcataacccctttcttgttatctcccaaacttatagacaacataaattttgtatccttgacttgtataatcttttaatttattcaacattttttgatcagctataacttcaatattagatactgagcctgtagcattctgctgatcttcttgtgtttccgttacctctttatttccgttatcttttactgaagctactcgaacattctgtaaaatcggtttggctaacctcataacttctacatctgagtcttcatcagtttttaatggctctttatcatttttcccttcatttcccttagaatcttgaacaagggaacgaattacagcttgatctttatcaggcacaagataaaagtctgcaatgtatgtttttcgtaatgatcccggaaccgcaaacaaccaactatcaggaatcggagcaataaattctcccttttcctcatttggaattagattatatgtatccactaatttggaataaatttgagttccttttttaatatcaattgaagcatgtttatttaaaagaagttgtacatcttcaggttttaacgcatcatgtacagctatatcttttcttacagaaactacttttatgtcatctttagtaatttccgatttgaatttgatatcttgctttgcaacaattacatcagttgtattaattttgtctttaaaaactagttcataagatcccactgtaccaattcctaataccatcattgaaacaggtaatagtacctttaatttccttttcaacttcatttcttcttccccttcttaaaatattttaggtatgaatctagaccttttcttcacaccattattaggtaattcataaaattgacgaggtaatatttgtactagaacgggttttagcactttttcgattttcattttatattgctcattatcatataagaattcagatttccacgttaactctattaaatcctcataaggaattgtcggaaaaagaactaacggtttcttatctccaagagattcaagccatgtagtagtatcaatcttttttgtatatttcatatttataaattgataagttactccctctgtttcctcaatctcatttaggaaatcaatagcccttttttcttccctttgtacctcagcatcaattccaccgttcttaatggttgatagccaatctattttgattggatcaggctctatgcaaatataaatatgatcagcatggtgtaataaactttgtactgttggatcattcaaacgattcgaaacatctacaatagtaattgtcgagttaatcgaataaacaaatttcagcatttcttcgtatccaaatgactctataggctctaaacgtgaatctattacataccaatccacaccatgttcattccatacagctccatgctttttaaatgatctattcataagaagttctcttgctacatctacatattcctgttccttttcttgttctttaacaggaatagccaagtaatcaaaggtgtaaggttttagaactggatactcaacataagatacttttaatcctcgtccagctattgctttagctaaattatgtgcaaatgttgtagaaccagccccagaccacatagagcctactacaattagttgattaggaatagatgtataagatgttttaaatacttctttttctacaaccttttcttgataaattatcttttcctttttttcaacaggtggtttagtagctattacacttgcattcacttctttgatttgtaaaggatcttcttcactgggttgtagggaaaagaagtttaatatttgttcaataactagttcaaaatcggattcaaaaacagtaaattcaatgtcatttctgtttaaaaaatcacatatagattttgaatcaatcacttttgaatctacaacaatataatctaccttccaaaattcaactacatcctctacatcagttaccgtctgtacattcttttgatatatttcaacctcctttccatattcatgattctctaaaattgcgactaatctctcaaaagcaaaattggacttcatcgagatcgctaatttcataattccacctactcttttgtgtattttattcacaaaatttataacaaaagtcctttctaaaaaaaggactatgtttatttaatcaacgttctttcatcacaagaaaattgtaccatcttgtgtttaattaaacaacaatttttgtgtattttttaaacaaaaatgtttaaatatccgaattagagcatattttaatattagaaaagcttactattacgatagtaagcctttccattaatcttatgataattctcataaactactttattatctctctaattctagctcttcctctttttctttttccttcggcttatcttccagcccttttaaagaattgaattcattttgagcttgtttttcgctagagtaaaattctgtaactctttcaacgccattatatttgtctaacttccctacataccaaccgtccttagaatttattacttttaaatcctcgcttttttctttttcggcaacataaacattattagtaatttcttctcttaatccattatttcttggtagatttttagttttattaaatgcataatcaactaattcatccatagtttgaatttctttattttttaataatgtccagcctattacattcccactattttctgaaaggagtatttctttttggctaccataggataaatattgtcctacatgaaaattggtatctattttaatatcatttagccttttatctatatcatttctaatatcttgaactttttcttcaagattttcatttaattgttctttcatgtattgctttaaaacggtttctttgtgtaaagattgagagattgctattctcaacaattgattttgtgcatcttttctatttgtatattccttagatacaatgtctgttccacccatacttgcaacagcatacttaccctcagatatcttgtgtacttccagcaaggattcaacatgcttaaattgagatgcttctactagtttattattagtaatttctttatttaataaatggtaatctccttgtttatgaacttcagataatggaataatcatatttttattggttctcaaatagaatttatcatttttaggtgaatgctctaatctagctgatagaataatattgttttgtttgttaagtaattcaaattgattagtatttaggttttctttattacttagttttaatcctaaatctttttcaaagaactctacagcttcataatattgtttatcgttattttgatagaaatctagaattttgtctttttgtagttcatcaagagtagaaattatatctcttgaaacctcctgaatctcacgaattgcatttttagctaagtttagatctttcgcccatgtagctatatatcctaaagaaaaatcatccctttctagtccataattactagaaactacataagcaacactttccgcttgcgcttccttatgtcctctcggaaggtctttcatttcactttctttatgatgtaacttcgcatgtgcatattcatgtagtaaagtagcaaatttgtcatttgtatttttattttcgtttgtacttattacaatttcatttgtgttcctgttataatatcccccaactccttgatcagtaacactctccttaatatcatatggcgttgtttccttcacatgtttaaagaaatctttatataaattatccattgattggttatctgacaaactatttttaataaaatcacgcactttaggaatttctttacctacagtttgggaaacatcaaacacgcttaccattttataaccaacggttctttctacagtttcagtttgaactttaccattcttatctagcataggttcttttgtcacaggatctactttttcaacttttattttttgcttttgtggagcaaggatacggatacttttctcatattgtttcggacttctcccaatcttcttccaatcattaaagccttgcaccatagtagcatgtggcttttgagcaataattaatattgtattattagttgaataacctttaaattgcgacattacttttagtaaatgctgaaaacgatcatttttaaaaatttcttcaaggcctttttctaattttttattggtatcttcaactgttataaagttttgcatccttctcacactcttttcacatatactggtttaaagaattctttatcaaatttattaatgcttacataaccatcaagcacataatcattaatatcctcattcaaatgaattatttcttcataatcaaaatgttgttccccttgtttctcataaattgatttatctgtccctaaaatctcatgtttttctaacatctttagtcctcctatttacattgaaattcaaataaaactttcccatcattaaaaacaagtacactagcaaattcttttttgcctttaaaaccttttatcttactagttttccctttttcacataaggattttatctgtgtctttgtaagtttctttcctgatttctctttaggaaatgtttgcttacaaccttctttataattggtacaaccataaaatttttctttttctacaatgtgtccctttttacaagtaggacaaagggctaaataatcctgagaagctatttgttctacctgttccgacatatccatttcctctagttgttctttcgtggttgtaactaaatgttgtacaaaccgttctgtattggcaataaagttttcttttgtgccttcattttttcctattctctttaaatatttttcccaacccgctgttaattttggattagctaacattgtcccttccactaaatcacataaaatcgctccttttttagtaacatacgtccggttatttttaatttctatatactcttgtttttttaaattttcaatgatattaccccttgtactttcttgacctaatccttctgtctctttcaaagcatttttttcttcttgatctaatttgtctaacactttacttccaccacaggttttcatgagtataataagctcaccttcagtgtatcttttaggaacttttgtcttcccttcttttgttttcaaaacaaccgcacaattatcaccacgattaagtttgggtaaacttcctctttcatcctcttctttactatcttcatgatctgtagtgaataagactttccatcccttactcacttccaccttccctactttttcaaactttaaattttgaaggttcaaatcaattttcgtttcctcataaatataaggatgatggaacattcctagtacgctatgaacaatttcaaaatagatatttttttgcttgtccgttaattgacttatttgtttttctgttgggattttttcagtcagtacaatagcataatgctcctgtacttttttattatttacatatctagaattgggttctaatgaatatggttcaaaatctacaccagcaattttttgatattcttttaaatgttctttcaaatactcaaactcgttttctgtaatatatggcgtatctgttcttggatacgtaactagggttaacggtttatcatacaacgattgaaccgtttctaaaacttccttagggctatatttgtattttttatttattagagcctgtaagctcgataaagaatgtaatttcggtgaagatacctttttcacttccgttttcacttcttctacaatcgctgtatttttcgaatgcaaagatatgttatgctcttttagtttttcttttaacaggtactcagaatcaaatttttctttgtatttggcacaaaaactttgattatctttttcaaaacacccctctatttcatagaaagaagtcggtttaaaattggtaatttccttttcacgctcataaattaaatttaacgttggtgtttgaacccttccaactgtaaacgtgcctttaatcccttttttttgaagcaatccactatataaacgtgtgccatttagtccgactaaccaatctgaaacttgtctcgcctgcgcttcatggtaatagctcacaaattgattagcatcttttaaattttcgaatccttttctaacttctttttcaactaaactattaatccataatcttcttaaaggcttctctccgcctcctgccaagcgaattatactataagcaatgttttccccttctcgatccgaatcggtcgctataaccacatctgaagcgtctttcattagttttttaatagtattgaactgttctaccttattatttgataccttaaacttaaattctgaaggaataattggaagatcttttaaattccaatattttaatttttcatcgtaatctacaggatcataaagtgttactaaatgaccgatagcccacgttaaaattgctgaattcggaaacaaaggacaagctggaatttctatatatcctttctttcttttggtattcatgaatacttcctcgtaggcttcagcctgattttgcttctccgctaagattaaagtatatcccatttataattcattctcctttatcctaaattctatatgatataagtcttgttagactgttcataacatcaaaatccaaaatttaaagcttactttcaattttataagacgagtatgcacaattttgcaaactattatccatctcaaataaatgtccgtatttttcgataatcgagaagaattcttttttactgataggttgaggttctacaaatacttctcccacatcttttgtataatcaacaacttcataattgtcgccaatggcatcatgagggtagaaactaaactcttttgttttaggatcatacgctaccctcaacaattcagataaatacttttcttccccatcaactaaaatcatatgttcagggcaagagatatccccatcaaataccttcccaaaacgaatccatattgaaacagatgaaataatctctcctgtttcttccaaaataattctgtcttttgctaacaagactttatcgtactctaattgatatttcattttcatcttcctttcttatttgaacattttttcaaagcatcagttttgtttataattttacataaacaacaaaaccaataattagccaaaatggaataactaaaatcaatgcatttatacaaccttcaataaaagcaaatggtttctcttcaatctttataacttgttccactactatttccccctcataaaatcatctttcccctcacttcatacccctattaaaataattaaggcaattagggtatttaagatatttttaaaagctatttcttattggactaaaaagtttaactcttcatcaatatctttttcaatgtcttttatgtcctgtgaaagtaacttttcaatatcatcaatattgttagccaattcaacgttcttggctatttcagttttattgtcctccatactttgcataccctgtttaatttttataacggattcgatgctttcacttgaaaaatcagcattttccataattgtttcaagttctacactataatctacatattcccgttcttcttcaaaaagtgtcatattaatagactcaatcttttctctcggtagatattcgtttaatgtaaatttaccatccaagtaatctctagccaatttttctatcgactgaggtgtatttatatcatcattcaaattatcagcttcattttcctcatgaatattcaactcaacttcttcttttttatccatttgcggttcaggttcttgaacgatcttctctttttgtaaattaactttcacatctttttctaactcattatcagttagttcctcaactttcttatcattatgattaaatagcgaacgatatctttctctatattcatcataatttttcaagaaatctttatagataacaaattgccatgcctttttcaatttcaaagggtaatatccagaaataaacacataacaatcttgcttatctatgtttattaattctccttcagtaattaaaggtcgttttacatattgctcttgtactgacttagaacttgaagacttcccactaaacatccctgacggactacttaatgattcggatgtcatacgaactgtagtctcaccagctaaattagagtaatattttgctgtctcaggatctttggttcttaggaatagcgtaaagtcatggttattaataatagttcgtgctacttcctttccatataaattttctaattgtgcattatcttgaataattgtaatcatactcatgcctaacccacgacaagtagataaaaccctaccatacttctctatctttccaatattcgcaaattcatctaacaaaaagatggatggaataggtagtttagaatcattacgatcagcaatatcataaaatacagttatcaattgatcgaaaaaagttgctgttaatggcgtgaacggattttcatccatacgaatttttatatacaatatacttttctctttttgaaattccctaaaattaaaatcactatgcgtagtcattcttgcaactttttgtagtgaaaatatacctgtttgttgcgcaaaagaagacaatatacttgtccttgttttaccttcagcaatgctggcatctttcaacaaattgtatgctgggtgatcttctccaattgcgtcacacaattctctcaaataattttcatcatctgatacacgataaaattccctcttaacatcttttggtaaattcgcattaggattttcactcttacaatagataattaatccagctagtaaatctttggccgtattaaagaaataatcctctttatcatctttcttagagttttttgatattgttttagctaattgtaatgcctcttgatcgtctttcacgtaatccagcggattatacgcattagactcaaaatttataaaatcaatttgatatactttataaccttgatcttcttttattttatgagttaaattatacaactcacctttaggatctgtacaaataatggttctctctctattgtttattaaattatttatcgcaaaagcttgacctttccctgatcctgaagatcccacgacatttacattttgattatctaccgtagtttcatcatgaacaatgattaacttctttgttttaatatctctacctagaattatcccattttcagcctttaaagttttaaaagggtctttttcggagtatttactgtctttagcaattgctcctcctttaagtaactctagaattgttccccatcttgaagtaccatgaaccccgaaatcactagcatcctcatattccttatttttcaatcccattttagaaatcacaaagcccattgatataactaatactacaagatataaaatttgcatttgcttatcagttgttttcatgaactgaattgtgccctcataatcctttaaattatcctgaagattattgtgttccttcagcactctaagtaatccagcatagaaatatccaagtataccgcctatagttaaaccacataaaatttgaacaaatttatttcttccttttcctttcatcttcactctcctataattcatgacctccaagataattttttctagcttttttcttcatttttcgttttctttctaaatcattatctttggtttcttgactttgagccatttgaattagagtgttaaataattgccctgaatcacttgcgacattattattcgtttgttcttcaaattcatgttttcctcttggctcaaatccttttctatctgaaggtctgtaatgattttgttcataagacttatcattatatttcttttgctttagtagtaataaatcttcagataatatacctgtactttctcctgttaaatgtagaagtagtaattggctttgaacctttggagggattaccttaattgttacatcatcaatatttggatagtaaattttcatcatattaaatagtttttcttttaaggcttcttttctactttccttatcagcaatttgttcactaattgctgtaaatttaattgatgaatcatatactttttccgcattaaaattatcaaatgtgtgtttataatccttctgaattttagtcttagttctttctaaaattagcaagtccttatttacactatcccattcattcaatacatcttttaaattatgatgttcatcattcaaataaggattatccctattaaaatcaggaagcgattcatggattatagtattctctctaaattgttgcgtgtatgaaaacttaatatcataaagatccacattagatccatcgaattcttgtgcatactcaggatataaaaacttaaattcctctttagtaaattccttttgaagttcataggctcttaaagattcatcatatatcgtttcaaaataagaaattgttcgatttaattcatcttttttactatctaactcattagttctttccaataataaatcttcaaatttatttggaatgaatccataagctagaacacttttaggattcttttcaaaggataatttggcttttgataaaaccttttcttcagcatcaatttgtagttttttataatcaatttttttcttccaattatctaatttttttagattctcttttgcactctgataatcaaggaaaccaccgacacgtccagctacttttttaagtacttcccaatcaaactctgataaatccattgatctacgaatctgattaaattcatttaacttttcattctcaaatttttgacgataatcagataacgaaactactttttgttcaataatttctatctttttattggcaacttcaatctctttatttatctgagcataatgtgaagatggctgatattctttaccttctttttttgaaatttccttttgcctttcctcaaattgatattcttctcttgtaagtctcaatcgagggattttatttaggccttgcttttcataactttcatgagaaatccgttcaggaatattcatttttttataccattcattcactttttcagcataagattcacgccattttaacaatgtttctttatcattccaattaacagaatgtatccattttccatcttcattttttattctttttttcccccaactcccatcttcgttgaaaggtctaactgtcaacataatgtgcgcatgtggattatgttcacgatctctatgtatagatatatcagctaccattccatcacttactaacatcccattaacatattcttttagcatttctttttgttgttcattagtaagttcaacaggtagtgcaactaaaagttctcgtgataatctactattccagttcctctcaaccttttcaacttcattccataacttttcacgatcataagcccattttggagcatgtttaggagcaagaataaaagaatcgggttttacttctctacctctataagacttaaattccatatctctctcagaatataacttctcaccactacgatatgaagccgaagcaacagcggattgactagacttattaatattcctcacattgaaataaaacagactcattttgattcttcctcctttcatttcccccgtagggctattgtcgccagacaacgtttgaatcataactttggaaaagttttgattacccatgaaacagttaggaaactgactgtgtaaatgggcactcgtttctcttcgtgatcattataccacttcgtttttcccccaacaagtttcatagtggtcttatatttagatttctcttttattctctatttcttttctatataattcaaataggaggtgtaatcatggtaaagttacgtacagacgagaaactaaatgatattgaagaacaaataaaaaaactccaacaaaaaaagaaaaacctagaaaaacaaaagaatacaaacgttggaaaacacttatttgagtcttgggaaatagaagacgaacaaacagcaatcactttgatcaatatacttaaagaacaagcaaaagaaaaattaagaaatatttcactaaacggtgaaggttctaatggaaactaaggatgatcaattaaagaaaattgatcagaaaattaaagatttaaaaaagttacatcatgatacaaaaaaatctattgagagaaaaaaatcacaaaacctcagaaaagagagagctagacgtttaattgagacaggcgctttagctgaaaaatattttgaaattaccaatcttgatatttctgagcgtgaagatcttttcaaaatcttttctagtttcataaaagctaataaaccgaatcattttaaaaaataaagacacctctttttaaaagaggtgtctttatcaataccacaaagtattcatgaatactttgtggtattaaagaaaaatatttctaattttatcagagttctaattcattttcttcttctctttctttctcattttctttattattttcttcttttgattcatatggtttttcatatttttttccccaattcgtttcacctgtttccgcaaattctaggaatttattgtccatattcttggtacttgcgttcatgtgacggaattgcggattttcttcttctaattcattctgatttttacttcctttgctcaatgtataaacttctttgataccttctaaatttttcatgttatttttttcatggtctttaaaagattcagggataagtctatatttatcttgattaaataaagttttgattcctccatcaatttcttttccatttgagtcttttagactaaatacttttttatcattgtcatactcactattagataaatcaatttttaatttttcttttttatttgtttccacattaaaaacaacaatattcatttctttatctttttcaggattccatcctaaagcaaccattttaggtagcatttctttttgtgaagcctgaatttttttatcgaatgaattgtatttttcaaattcactccaatattcattttctttcttctctaaatatacatatgggcttccatgtttctgataaaactgagaatcttctttgtagatctttaacatttcatctgaaattgaattttgtttcttctcttcttttacctcttcaatttcatcaactttaatatcttttccttttcgctttaaatcttccatttctttctgttgttctattagatctttctcaattttatttactgattctaatgttttatttgttttttcatgattcatattcatttcttttcttaatttttgtatttcctcaataacttcgttattagtttctttaaattcttcagattgcatttttatattctcatctaaatattttaaaattacttgttttgctatttcaggatttttttctaaatactcatatactttttttgttttaccattcaattcttctttattaatactttccaatgcttttttatcaatatctttttctttttcttttccttctttatctttatctttatctttatcgttatctttctcttctttcccttccggatcacgttttatttttgataactctcttttcttaaaaatcgctttccatattctactcattagttcatacattgcttcactaaaatcatctcttgtttgttcagcattattcatagcttatttcctcctttttctatacaattatcaattaatttgatatacatttatagtataataaaaaaaaattaaaaacatataaaagcaaaataaatttaatataatatttttaaaaggtggctgaatttttttgaaacaaaatttagatattccattgcaaagaaccgacaaaaataaaattatggaaattaaaaaatcatccaaaagaagttatcttgaacaactacaaggaatttttaattactatgaaaaaatttctgtagaattatttgccgataaagttataaataattacgatcaacttaatgatttaaagaaagatttagttacaataacaattaaaaatgaattattcacacaagaagagtattttagaaagattcacaaagcaattcttactaaattacctcaactagagtttaaagaaatgctaataatcatgattgctcaatacatgaaagataaagaagatccagcttcactattttaaaaacaccattttaaataggctgataagcctattacacttcttttaaaccctcgtgaaaaaagagaagcatctacatatagtagatacttctcttttttcacgccttttaaaggctctcacaagacaattactccatttaaatacttaccccttaccaaaatatccaactcacgcccacgcctcttttaaccccttaaaacaaaaatacaattctcccttagataaatgtgctccaagtcaaaaaagacaacacctcaaaaacaaaacaaattctttttgaattcattaatggaatctttattacaaaaaataaataaacctaaaatgaactttatataaatccataataaattctaaataaatttattatgagtttctttttgattctctttctgaataaaataattgaaattcaaaagtatatctaaaaagaattcattttaaatcttttttacaccttatttctaaaaaggtctaccgcccacaaaaagaattcaaaatgaattcaaaaaagagttgttttatattttattttgttgtataattaactcaaggatgatttaaacaaccaaataaactatgaggtgaataacatgtcaaatgctaatgaaacacaagaattagaaacacgaactaagaattacgaaatggattcctctttcgatattggaaatgcaagcatcaaagctaagatcaatggagaaaaattaaaacaaccttctgtaattcaatatttattagagcaaccgcctgttactgaaacaaacttaacaaaacttgtcgctaatttagatgatgatttaacagtacatataactagtaatggcattaagcgtaatggcttatataacattggaaaaagtgcaactctaacttctgattcaaacgttgaaaatatgaatataagattagggaaaaaacacaaacatacaatccctgttgctatgacattgggtatgatggcttgtgaagctgtcaaaaacgcatttacagaagacggagttctcccttctacaattaatatcaaatctaatttaagttcagcaattcctatgagtgaatatacagttgataaagctgagtttttagagagacgattcgctgaaaatacacatgtagttgtagtttacgtaggtaagcttactgttactgtttttattacattcgaaagtgtaaaagtgactaaagaaggtgtaccatcactttatgctttaattgaagcggattccgatattctcaataaatacaatgaacaataccaagaaaacgccaaacctaaagattttgtaaacaaaaaaatcttgcacgctgatattggtgacggtacaacagaatatgtttacacacaaggcttaaatcctattccaaaaaactgtacaggtgaacgtcgtggggttggacatgctactgaagatgctatcaagctattaaaagaagatacaaacggacgtgttcttttaaatcgccaacaatacatgaatatcctaaatgatcctactcaccgtttgtatcaagatgcatctagatttttagaaaacagcaaatacattcaagctaaaaaaatactagaagatattgaagaaaagtacacagaaaaaatagccggtgatgccgatttcatttgtgtatacggtggtggaagtatagaatttgaagctttactttatgaagatttactagagttttgtgaagaggtaaattgtaagttattatggattccaaaagaatatgctgttgatatgaacatggaagggctatccatattaaacaaaaaaatcttttttaaaaaggggtgaataaacagtgtcaagagccaacgttagttggaagataaaagatattaaagatgaagaagcaagaaacaaaataaataagtggtgtgatcagcaagagaaaatacaagtttcattaacgagcttagtacttcatatgatagaccgtttcggctataaaaatattaccgatcacgatattcaaaaattactacatcaagagtttcctctcacaagtattacaaaagaggtaagcatttctgaacctatagaaaaaatagaggaaacacctgataatatatctaagcaaacaaataatataactacttcccctaaaaccattgaggaagcaaaaaagaaccctgtccctaaagaggtacagagttctagtgaagatgatttatatgctcaggttgataagaacgctttttaaaagcgttcttatcaaccaccaatacccttttaggcttttttcaccactatcagtaaaaaaacaatcccatatttcaacaaaatatgatatactcgttagcaaagatatgatttctaatttgtatctttgctattttttgtaaaaaaacaacatataaagatgtaaaaaatataaaaaaatataaaaaaagaaggagcaccgacaaccgccaagtaatcgaactcctctctaattcctattattattaatttaattataatcttctacattttgtttgtcaatgttatattggcttatataaagatgcaataagattgtaattttccccaattagagagttcgatgttaaaagtgcccttctatgtaaataggaggttttttatatgtctgaaacacaactagtaggccaaacgcctacctttattactcagggacatgtcccaaaagaagaattaagactaccaaaccaacattttataaccgcaatggattggatagataaattaggagaatccgcttactgtgattatttaaaaatgtatacaatggctgatcgtagagataaagatagagaatatgatagagttccaagagcgctttctagtttatgggaagctttagaccgtaaagaaaagtattttcgtcaaaagatacttattccattatgggaatatggcttagttgatttagtagaatatcaaggagaacatgcaagagctggacataagcctatgaatatagttatttatcgttacccttgtaatgacattactcttttaacaaagcctttagaaaaagtacgtgactggaaaaaagactataaatcatcaggaaagttctatgctataaagggtggaagacctaaaaacgaactaaaggattctccacagaatcctttagtaaaggattctctacagaaacctttaaaggattctccacagaatcctattaataatactaaagaacttaataatttattaaattattttagtaagtatgtaagtatagatctatctcctatcgacttttttaaatttgctattgtaagttcaccatcaaaatatgtagagattgaattaaataatttaactactacatatggaaaagatatagtgaatgaagcaattaaaagaatcagtgacatgaagactgataaatacatagctactataaaaggtattatcaagaaatgggtatcgcaaggaatgaaatctttttctgatattgaaaatgttgagcaagcgtatcttgaagaaagaaaacaattacagaaaccaaagtctcaacaaaaaccaaactctcttaaaccatcatacggaaagaaagatattgttcctgagtggcttaaagaacaaaaacttaaagatgaagaagtacaaactaataaagagttgcatcaaaacagtgagagcatacaagtgactactgaaactattaaagaaaagattcgtttttatgaaaaaaagctaaataaatatattacagaagacattacagaagacaattggaaagtagctaagatctacttagatgcaaaatgggattggacagaaataggcatattatttaaagaaattgatgaaatgaagaatgcgattcaataaaataaagtgttaaattcaaaatgaattcctttggattgttaatttaaattcagttagaattcattttggatttcttttaaacctcttgtcattttaaatagaaatatagtgtatagaaaaatgcttttcccttactattttgtggaagcattgggtgggggttcggtgggctaagcccccgagaacttccgtattttattatcgaataaaatattatttatgaacgttaaactagcgattcgacagggtatactagttaatccaagctgtgatgatcatcaccccctattttgttatcagcttggtgatagctgataacccagtcgaaaaaaatttgtaaagagtaaggtgtggagattttttgaatggtttctcaaaaaatactacccgttctttacaagatttttagctttatatgttaagagggattttttgagtaggatctacataaaaggatttctccagtggcgtgtcaagggaatagcacaaatgtttttagagttgatgttgagttgggattttacaagttccacaatttgctataatgctaatgcgaattgtggaacgccataaaagcataaacgaaacacagcgattaaaaatattttgcccctttacacgccacttcttcgggggtatatagcccttctttggaataagaaaggtatacaacaggcatagaagattttgaactcaatctatgccttgtgtatattaaatataggtagttagtttattagtttcgttgttttatctttaaattcttgttcatagacaacaatattgtatttatcacaatttttatcattccatgaattgaaataataactatcatttgtttccataatgtctagagtatcatgttgccctttaaagtcttctagagtaaggctattatcttctagatatgtttttgcttctcttttagcaaatattatcgcattattgatatctttgaataaatagactttgcttcctgttccgtcattataaaaatcatattctactagaactactattgggatacacatataaaattcctccatgataataattttttataaattatctattgtgggtcataaggtttgagaattttgtttttagatatattaataatttattaattaatgagttactgtaagtttggttattaatctttttagctattgttctatctattgaaatatctgatgctatttcatcaatacatctactaaaagcatttagattaataattgtattatgaaaagtatcatctacctcacattcataactaagttccagtaaaattgtttgaaatttatgcaataattcttcttgtccttgtttcatgttaactactccctcgtatagtatgtttaaacttaatttttttactttcatgagagacctgtaaaaaataaagtattgttgtccttattcccccttttcggggggatgggcaaaaacaccctactcctaaattccaatcacttacaaaaatcctggataataaaaaatggacaaagctacgaaagttagcacaagagaaagaggtaacgccttccgctctactttgtacaatatatggtgatgtgttggcatattggagtaatcaacgtcgattagcaattaacttgactgtatttaaccgttatcctgttcatgatgaagtagaacagattgttggagatttcacatcacttattttattggatgttgatgtaaaaccagagcaaactttctttactagagtaaaagaaacgcaagctactttattagatggccttgaacatcgtcattacgatggagttaactttattcgagattttactcgatatcatcagatgacgccaaaagcagttatgccaatcgttttcacctcgatgttagcaggtgcaggtgctttctcttgggaacaacttggttctcttcgctatattcatgctcggactccacaagtgtatttggataatgtagtaattgaaaaaaatggagagttattaattagctggaactatgttgaagagttgtttgatgttgatgtaatagaagcaatgttttcccaatttgttgacttattggaacaattggtgaaacaaagcgatataacatctttgcatatgaaagaatcggatcaaactctaattaagcaatacaatgaaacaacagaaaaaataccttcaactactctgtatcaattatttacagaccaagtaaaacgtacgccggatgaagtagcagtggtatttgaacaagaatggttaacatactcggaacttcataaacgttctaatcaaattgcccacttcttaaaagagcaaggtattggtctaggtgacaaagtgggtcttttagcaaaaaggcgagttgacacaattgttaatatgttaggtattttaaaatcaggtgccgcttatgttccgattgatcccgatcatcctttagatcgccaaacatatattttaaaaaatagctcatgcaagcttttattagaacctagtctttatgaagaaaatcatttgtcattttatacaacagaagatatgcccgctattgctggtccagaagatattgcctatattatatacacttcaggaagtacaggaaaaccaaaaggagtaattattacttaccaagcggttacaaatactattcaagacataaatcaaaaatatgaggtgaatgaagatgatcgtattattggtatctcttccatgtgttttgacctatctgtatacgatattttcggagctttaagcacaggtgcaatgttagtaatgattcgtgatccgagagacatgcaagaattaatccgcactgtcgaacgtagagggattacaatttggaatacagtgcctgcaatcatggatttggcattggagcaagtaggttctcattttgaatatccttctttacgtttagttttacatagtggagattggattccgctttctttaccagaaaaaataaaacgacattttccgattgcagaagtagtctcactaggaggggcaacagaagcatcgatttggtcaatttattatccgatcaaacaggtggcatcacattggaatagtattccatacgggatgcccttggcaaaccaaacgtattatgtgttgaactatgaaaagaaaatgtgccctgttggtgtaattggagatttatatatcgggggagtgggccttgctaaaggatatgtaaatgataaaaagaaaacaaatgaagcgtttgtgtcacatcctgattttggtcttatatataaaacaggagattgtggaaaaatgcattctgagggatatattgaatttttaggccgccaagattaccaagtgaaaattcagggatatcgagtagagttagaagaaatctctcattgtcttctaacttataaacaagtcgaacatgctgtcgtaattgatcaaacagatgagaacggaataaaatttttagttgcatatgtggtaactgagcaaaatattagtacaacagaactacgaaagcatttgcgagatcacttgccagattatatgattccttcttattttgtttatttggaccaattacccctgactccaaacgggaaattagatagaaaagcgctccctactccggagaaacaaaaaaataaagtatttattgccccaaaaactgaaatggaaaaaatattaactagtatttggcaagaagtactcaaaatagatcaagttggagtaaatgatcatttcttcgccttaggtggagattcgataaaagcgattcaagtgtccgtcagactgtatcgacaaggattcgagcttgaaccaaaaaatatattttcatttcctatattaagggacatggttcaatttgttaaaaagctagaccagttttcaagttcacaaacaaatgatgtaaacataatgaacgataataaagctacattactaaatgttaaagataaacaacttaatcaacatacacttaacaaaatacaagaaaaaatgccggatataaaaatagaacgtatttacccgttagcacctttccaggaagttatttatgagcatgctacgaatgaacctgatacaaatgcatattttgaacaaacaatttgggcacttgagggggagctggatattaaactctttattcagtgtttccaacaattagttgatcgtcatgattctttaagaacaataattgtgcaagatgaacaagcaaaaccttggcaagctgttctatatgatgttcaaataaattcagaaataaaaaacttgattgagatgacgaaacaagaacagcaagaattcctaaaacagtggatgaatgaaaatttaagtcgaggatttaaaaatgatgaacttatgacacgtctctgtatattccaactaggtaataacgagcataaagtaatttggagttcccatcatctattatgtgatggttggagcgtcagcattttgatagacgaattattccagctctacgaaactacaaatgccggaactacggcggggttacccatggtaaaaccttttgaaacatttatagattggactttggcacaagatcatgagaaagcacgtcatttttggcgagattatttatcaggatacaatcagaaaattagtattcctaaaaagaaagtcccatctaaaagtgaagggttaaacttcacttttatggatttaacattagacaaggatttgactgatcagttacagacatttgtaactaaaaataatataactatgaatacggcattactagctgtatggggaatattgcttggcaaattcaacggaacgagagaagtagtattgcctaatctagtatcagtcagacctcccgaagtagaaggaattgaaaatatgttcggtctgttcacaaatgttttgcctatccgattagcatggacagaaacgcaatcttttgtggacttcctgcaaaaggtacaactagagacattgaaatgtaatgagtatgcatactattcatttgttgatatacaaaagcaaagtgaattaaaaactgagttgactgaccatctttgggtttttgaaaactatccaactaatccagcaatcttttcttcaaatgaaaacagacattttgctatcacggattacgaagttgttgatgagccacatgtaaagtatggaattatgtgcttccctgaagaaagacttacaataaagtttggatatgatcaaacggtatatgaagcagagaaaatacaggaaatattaaatcacatccatgggttaatcaacacgattcttcaaaatccaatacaaacaatttgtgattacaaattataaaaaatgaaaaggcgagcaagaactcgcctttttaaatagaataggagtaaatcaaatgacaaaaaaattacagttatcagccgaagaaatgcgtcagttaggatatcaagcggttgacttgattgttgatcatatgaatcatttaaaaagtaaaccagtttcagaaacgattgatagtaatatttttagagacaagctaattgaaacgattccggaaaacggatctaatccaaaagaattacttcattttcttaataacaatgtgtttaatcaaattactcatgtggatcatcctcattttatggcttttgtgccaggtcctaataattatgttggtgtattagcagattttttagcaagtgggtttaatgtatttcctacagcttggatagtaggtgcaggtgccgaacaaattgaattaacgacaattaactggttaaaatcaatgctaggattccctgattcagctgaaggactatttgtcagtggtggttccatggctaatttgactgcacttactgtagcgagacaggtcaagctgaataatgacatagaaaatgcgattgtttatttttctaaccaaactcatttttctgtagatcgagcacttaaagtattaggttttaaacagcatcaaatttgccgaattgagacagatgaagacttaaaaatttcagttagtactttaagaaaacaaataaaagaagatcgattaaaagggaaaaaaccattctgtgttattgctaatgcagggacaacgaattgcggagcggtggactccctcgatgaattggctgatgtatgtggtgatgaagatatatggctacacgtggatggggcttatggggctgcagcaattctcagtgaaaaaggaagggagttattaagtggaattcatcgtgccgattctttaacgttagacccgcataaatggctttttcagccttatgatgttggttgtgtacttattcgaaatagccaatatttaagtgaaacattccgtatgatcccagagtatattaaggatacagaaactaatatagaagaaaaagtgaattttggggagcgtggaattgaactttctcgtagatttagagcattaaaggtatggctttcttttaaagcattcggagttacagcttttcgtgaggcaattgatcatggcattatgctagctgaacaagttgaagagtttttaaggaaagaaaaagattgggaagtagtaacacctgcccaattaggaattgttacttttcgttatattccatgtgagctaacatctacagatacaattcatgaaataaacaaaaaattggtggaagaaattaatcaaagaggatttgctatgctaagtacgactaaattaaaagaaaaagtagtaattcgactttgctctattaacccaagaacaacaaaagaagaaatacttcaaatcatgatgaacataaaagcattagcagaggaaataaacacatcgcctaaacatcttatatctgtttctcaaccttgatatattaggcggattttacatattaatagccgattcttatttagaatcggctattatatttaaatgataaatacatatatactatttataagtgtttctcttgtaatgggattaagcctcaaccttggatactcgtttgaaaccagtctttattgcttgtactatttcgttcacagcataaatagatacatcggcatttggatttaacccttcaaaccagtgataggcatttggatataaatgaaactccacatcaacaccagcttgtgctagtttgcttacataggttaatgtttcgctgcggaatggatctaattgaccaacaaatgtgtaagtatacggtaagtcactataatcctcagctcgagaaggtgctgcataggcagggatttgatccgttccatacatttctcctaaatacattttccagccagcttcatttgccttttggttccaaacaaatccctctttaatttcattcgctgaaggtgtatcatttctgtcatcaatcattggatatagtggcatttgtaaacaaattgaaggatattttcgatctcgtgctaataatgataatgctgctgttagtccaccgccagcgcttactcctgcaaccccaattcgattcgaatcaatgtttaatgactttgcattatcagcaatccattttaaagctgaataacaatcctcaattggtgctgggtaagggtgttcaggtgctaagcggtagtctacagacacgaccacacagctagcttcttttgcaaacctcatacaagtatcatcgttatcatctatagaccctaagatataacctccaccatgtatccataataagacaggtaaagattcatgatttgattttggacgataaattcgtaatggtaacggattatcatcaggcccaacaatgactttatctgttaaagaaagagagtcatcaacaacggtaggtggtctcatttgagctattccttctctgattgattgcaaattttctgggcgtaaatcgagatccggaaacatctctaatccttgtaataattctggatttactctagttttcattttagcacctctatttgtaattgttttcaaataaatgaagtgtattctaagtagtttaattgtgaaagaacaccacaattaaattgtaaattggatatgttataacggtcaacagaatattcggaaattaaaacctttctcaagaaggagtttcatgcaatcaataatacaagtagtggatttaagagcaaagtggtttaatgtcgttgtaattatgtacattagaaaaatttatttttgagtctagaaaaggattagattcttttctagactcatgaagaattatgaaaagcaaaattttatagatagttatcttaaaaataaacaaagagagaagaactagccaatgttcttctctctttttcatatgtaattagggtatccataactgtaaatacggatggtatagatttatggatgaataatttatttttaaattaataacgtaatacataaagatttttgtatgtaatattgcatatacagggaccactggtgaaaatgctgagcaatgtttttccatatggtaaattagttccttagttatttattttatttcattttcaatcgtgtaaggcttggggctaagatttacaaaggtgactagtaaaaaatataacaatataagtataagattttgtacttagtaatctcacaatttaaggcatgacattggataagtgtgaggagttcaatcgattttgaataaaatcaatagtatcagttgcaatttttttacgtttaagaacgatcccggcatgcccacatttataaatatatcgtgtaggtctttcccaagattcccacaagtagtctgtatcctcagaatgcacatatagatcatgcttacctgaaattaataaaatattttctttttttacttttggcaatgcttgactcggttcagtgattttccaataatctattaaatcatcatacgtaacaccatgatgttccaagtcttctctaataaatttacctggagttgtattccaaatagaataagaaagtcgatttgcatagaaaatggatgctaacacatcaatttcttcttcaacaagagaggttaagttagtaataaatccgcctaaactaattcctattagaatcagggtcccctttttatttgctttaatccatttaatcaaagctcgtaaatcagctaccgcttgtctagttgcttgtaatgttcgttcaatatttgcacttaccatatactctccactgaataaggattgatcgggttttctttcaaaatgatagggtagagtgaaataatacatattccacttcaggctggtcatatgatcgtggaatatttttttcacacgttcgttagaatccattctccaaccgtgaacaaagataacatgaggtgcattttcattttcatgtaagaataattccccagttacagagtcgttgcgtgaatcaccggattgaaccgaacttttatagttgaattgcccaaccatgtattcattttcctgctttgaatgcttaatgtcaaaatgaaaatgtgatggttttactttataaaaagattctatgttctttatatttaatgaagtgttagaaagggaagtaaactgaaatgctacacttctttttttgtgtaaatcatataaggcgtaccgatcaatgagttttgaaaaaatcaaattaacctcctccaaaatacatattgtttaaaacatagacaaaatttatgttttaaattaattaggaaatattctcttttcctaatagtaggtgcttgaattataaaaataggtgataaatttgtatattatattataaatcgtgcaataaaataaaactataaataatttatattaaaatttaagaagaatgttaacttgtttcttttcttattaaaagatgtaatttctatgaggaacttaacaattcccatctagatattcacaaatagcttctctatatttattgtatagaaattatacaataaatatattttttatattatatacattaaattaagcttaacctctttttctataagtctcttaaattgactaactccttaccaatattcaaaaacgactgcatttttgaatttgtgttctagtttttcttgaacaggtaaatgaataactacacataaactccttatatctctagttaaactaccgattagctccatataaactctagataacctatatagaatacaagttatcaaggaggtaagaaaaatgaattttatgaaacgagcaattctcagtatgaaaaaaaggataggaacatcattaattttgatggcagtttttctgattgttacaaatttggttctttcaggttacacaatccaaaatgcatcaaaaaaagcagcggatgctgcaagaaaaaaacttggtgcagatgttactttaggtcttgatttcgacaaaataggtcaaaaagctaaggaaactggagaaatgccaaatccgccgcagctcgatgcaaaagaaacaaatcaattagcgaagtccaagtatgtaaaagattataattacatagctaacactttcggtatttctgatgggcttaaactagtaggagcttcagaaggagaagaagaaggaaaaggtaaagtgggaatgacggctgcgcgaggcggttcaagttctggtacagaaatagatatgaatgcttcttttatgattgagggagttcgcaagactgcattacaagaaagctttaaaaacggaaaaagtaaaatcattgatggaaaaccaataacagagcaaatgaaagatcagaatgtagctttaatggaaaaacgattagcggaattaaacaatttgaaagtaggagacaaagttaaagtacaatcaggggataagaaggaaactcttgaggttgaaattatcggcatttacgaaacaaatgagcaagcaatgggtcaacaggctcctcctattatggatccagctaataaactatatatgccgcattcaactatgaaaaaattagaagtagaccaaggtataagtagtggtcaagtcgtgtatttcttgaatgatccacaatatattgatgcatttaaaaaagaagcaaaaaaatctaacattgattttaattattataaattagatgcgcatgattcattgtacaagcaaatgattggtcctatcgaaaatatctcttcgacttctcaaatgattatttatattgtatcgattgcaggtgcaattattttaggattaatcattatgctatcaattaaaggacgtcgtaaagaaatgggaattctattgtctattggagagaaaaagtggaaattgatagcgcaattcgtagtagaagtagtgtgtgtcgctattttagcatttggattatccataacaacaggagctaaagtttctcaatatatcggagataatttactttcgaatgaaattgctactgcaagcgaagaaacagatacttcgcaacatggtactgtaatgatggctggatctggtggtactctacaaaatcaaaaagaagatccaattgataaaattgatgtaagtgtaacaggagaagatgtagggaaaatgggtggaattggactagctattgctataatagcaacgcttcttccagcattatctattctacgtttaaacccaaaacaaattcttttaaaagatgaatgaggaggcttaatatggagacgattttacagtttaaaaatttggattattattatgaaagtaatgggaaaaatgtagcgatactagataatgttaacttttcttttcaaaaaggacatttctacacgattttaggaccatctggatctggtaaaaccacaactctgagcttaggttgtggactggacgtccctaaaaatggttatgtactgtataatggcaaagatattagaaaaattggtttggatcgataccgtaatcaaaatgtatctgtaattttccaatcttataatttgataacctatatgacagctcttcaaaatgtcttaacagcaatggaaattacgggtgttaaagtgcaaaataaaacagcaagagcattagaattgttagaaagggtaggactcacagaagttgaagcgaaacgaaacgtcctgcaactaagcggtggacaacaacagcgtgtagcaattgctcgagcactatcttgtaatgttgatttactgattgcagatgagccgacaggaaacctcgacgaggaaactgcaatggatataatagaactatttcaagaacttgcacataaagagaataaatgcattattgttgtgacgcactcacaggaggttgctaaaaaatcagatcgtgcagtgtatttaagtaagaagaagttggtcgtaaatgaaatctaatataaacatcgtagttttttaattcacataattttcaaaatctagacctttcaaaagcttatatttgatttataataaaatcaagccataatcaaaatggtctccctgtactgaatgttaaaatagtttgttgttcccgttttaataatataataaaaagaacttgtaggatattctacaggttctttttattataattggttacctatatcatgggataatcacacataaaaaacgggacattacctagatgtatgacctaaatatcgtcccgtttacctactctgtatagttattgcagaattaaacctacaatcataattaaactaaatactattatccaaccaaacgcacaatagccaaaaattctaatccatttaggtaattgatgcatgttaattttatttgtgggaactccttgcatagaaaacatcattttttgatctctatctctattattttgttgttcatacatactatcatcacctttccagaactattgcgtttatagtatatcagcctaaagaaaattatgtacagaataagaagggatagcataaatattatgtggtgaattttataaataaatgcatttaattgccatggttctaagcgctaatagagcactacataaataggactcattttcttcaaatattaagttgctggatatagatcaggaccaaggtaacgttcttttataatttgaagatgatgaagctcatgaccagcaataatgtatgctaatgcatgaactgtaacttcagaattattcgcatttcctctttgtgaccaagcttctttatctaagcttctaagtaaatgcagggtagattggcgaacaactattaaattcccaagaagatcttgcatagattgcttatcaaaagcagctctaagaacatacatatcatcaaatgaaaaacctgttaataagtttatacttactacaaaaacaaacaaactcgtcctatttaaaggagagtttgtttgtttttatgtttagataatggaatactcatgcaaaattgcacactatgttccatatttttcattgaatactttatatctagtgtttcaagaatttgtttaacaatatatagccccaaaccatttcctccagtatttcgatttcttgatttttcaattcgataaaatggtttgaaaatttgttgtaaatcttcatctttaatattgacacctgtatttataatttgcattttgatttgaccttgtttcgaatcctcatttaactttatatagactttttcattatgtggtgaatacataaccgcattgtgtataatatttttacatgctttttctaaaagagcacaatctgtataaatagaaaggtcaaaatcaatttcttttattatttcgatgtttttttgagaagcaaaaaattcgagatcttttgtaattgtacctattaattttgaaagattaactttctctacttttagtttgaaggtgtgttgttctaatttcgatacgcttaaaatttcacgaactaattgttccatactttcaataatttgatgatttttctttaaatattgatcgcgattttgataagggccaatattgtatatcattccttctaagtatcctttcattacagtaagaggggactttaattcatgtgctacaatcgcaaaaaactctctgcgttttgtttctatttctctttctttttcaatatcattttttaattgttcatttgctttttttaaatcaaacatagcttgttgcaagttaatagacatgtcattcaaactattagataattctcctaactcatctgtagagcgaacctcaattttttcggagaaatctaaatttgccatcttttgtgcaccttcattaatataaataagtggctttgtaataaacctggaataaaaataagcacttcctataccaataacgagcacaatgatactaatataggggagaaagcgtactaaaacctgtgaagcttcatcaatcggttgaaatgtagcaaacactataagcgttaaactaccatcttgaaattgaattggtttcgtaacattatatgaattgctgagggtacttgcattctcgaatcgtgttgctttagtaactactgttttttgcgtaccactttgaataaaagaaaatgaaggagagtaaataattactccttctttattttgaagataaagcatcgcattatttttttttgcgtattcatcaaaaagtggtatcgcatcttgaaacgtaagatttttagacttatcaatgatttcgtttatccctgtttgaagttgatctgttttatattgctcataaaacgtagggagaaagaagtataaagttaaataaatcaatactgcaaaggataataaaatgagagatgtagtcataaagagtttataagtaatttgcttcattttcatgagtttcacaatactattcatcaattttataaccaataccctttattgttttaatataagggatagctaattttttgcgtaggtttttaatatgtgtatcaattattcgtgtttctccaaaataatcgtaaccccagactttctctacgatattttctcttgtgagtacttttctctcattttgaaatagtagttgtagaatttcaaactcttttgtcgttaatataatttcaacgtcatttacatatactctatatgcatccacatcaatacgcacttctttaaatatcaaatgattatttacatttttatcataacttcttctaagtacagcttcgactcgtctaatcaaaacatgaaatgaaaagggctttgttatataatcatcgatcccaaggtcgaatcctttcatttgatcttcctcttcttccaacgcagttagcataataattggtacgtttgactgacttcgaatcattttagaaacttcaaacccattaagattgggcatcatgacatctagaagaattaaatcaaatgattgcttattaaattgtgtcataccctctagtccatctgaagcgactatcactgtataatgctgcgtcattaaaaattgtttaattaattcctgaatttcttgatcgtcctctaccacgagaatatgatagtttttcataatatcacctctggtagtcattatagccgtactatctggagtttatgtggagatacaataggaacttcataggacgtttaacgtattagcttcattttcaagaatgtgtattctccaaaaaaatatgattagccatattcctttttatgaaaaaataattgtatgcttgaaaaaacttatcgtatgaaaagctgaacgatttatatttctaaaaaaccaatgtataatattgggaactgcatgtgatttcttaaactgtgtgaacatatactttcgctacttactagaaggggaaacggaaatgaatttcaatataaaaaaagctagcgaaattatagagtgtacttcacaaactttagagttttttgctaatttagtaaacgattaaggtgtgaactaaggattatttaaatcatgcgagaaaggttgtgaaattatttgatgggttataaagcgatgctgtttgatttagatgatacattacttgatagggataaagcagtagaggcattatttttaattgttttagaaaagtgttatgaaaatgtagatggtgcggctaaaagcaacatgttacagaaattcaaagaatacgataaaagagaatatggcataagtaataaaacgacagttttagaatcattgtttgatgaattcacgccaaggtatagattgccacgcaattacatccaagatttttggaataataatttccctagatgtttttcaatagaccaaaatactattcatttcttaaatcaaataaagaagcgctttaaagttggaattataacaaatggctcaactcagaggcaaaaagctaaaatatttaacacgaatttaaataggtattttgaaacaatcattatttctgaagaagtgggatttagtaaacctgataaacgtatattcgaactagcattagataagctaaatttacaaccggaaaatactttatttgttggggatgacttagaaaaggatattgctggtcctcaaaatgcaaatataaaaggtgtgtggtttaaccctcagaaaatcaagaatactaccaaaatacaaccatatgccgagattaacactttggatagtttgttaagttatgttactccacaatatttttataacaagtaaaagtaattccatatatatattcaaaaatataaaaaaagagaaactatcattaatttcattgaccgtattagtaataaaaaatatgtatttacaacaaaaaatagaggctattttaatagctgaggctaatttaatctatgattaatacgaagttttgtaaaacaattttactcatactgtataaattataaaggggtgggactatggaaataaagaaagtagtaatcgatggaatcaatattgcggtcattaggaacgataaggtattaatatcggatgttcagtctgcattagatactatggcaacagttcaatatgaggtagatgcgaaacatattattatccataaatctttaataagtgaagatttctttgatctaaaaacacggcttgcgggcgatatccttcaaaagtttataaactacaaggtaaagattgctattgttggagatttctctatgtatactagtaaaagcttaaaggattttatttatgaatgtaataaaggaaaagatattttttacttagcaactgaacaacaagcaattgaaaaactaagtacattaaagtaataattatatcctgctaaattcccccatttcacttagttcatgattatatacgatatagaagaactgatgtttgtggtaaactaagagatgaataaagggggcgttttcttgaacaattttaatgatacgatccgagatttaaacaatatagtttacaaacctaacaatttaatgattacgaatctaaaagaagaaaagcaaaacgcagaatatgcaggatgtttattccacttaaataacaaaaccattcgttttagaaaatcaaaagttactcctaataaaattggtcaatttgtttctttttgggagaaagatgaaaatatgcgaaatagagctttctcttatgaagctgctcctgatttattagtaatcacttgtattgctgataataaactaggacaatttatttttcctaaagaggttcttcttaaagaaaaaatattgagaacacaaagtcaaacagggaaaatggcaatgagaatttatcctgtttgggataccactgttagcaatcaagctaaaaggagccaaacgtggcaacttcactattttgttgatttaagtgatagtaataatttgcctatagataaactattaaatttatattcgtagcttttgatttgcctcaaaaagaagtaattacagaaaagacatttgtaatgacgctttctattaatttacctcgtgaatcgtaatttttgtaccggtacagttaaatgaaatgtacattgttacagtgccccttaaaatttacaatcagcatatattatttaaacttataaatttttaaggggtgctaattatgacaagtttacaaaatcagcttttcacaagattaaatcttaaaaaacgtaatgaagtaacgtttgaagaattacctactatactcttttcatttgcacacactataccatttgagaatttagatgttatagcacgaaatacgaatcaaatctctctggaaaacttacgagagaaaattttaactagttcccgtggtggactttgctacgaattaaatactcttttttactatttcttaaaaaactgtggctatgatgtacaactggcattaggtacggtgtataaaaatgatataaatgcatgggcactggaggatggccatataacaattattttaacttatgataatctacagtatttaattgatgtaggtatagcttcgttagtacctcttgttcctgtaccttttactggcgagtctgtttcttcaaaaaatggttcgtaccgagtgagacgaaaagatacaagtaaaggaaattatgttttagaaagaatagatactgatggagaatggaaagtttgtcatgctttttataaacctaatattgatgagatagtaataaacgatgttcaaagaagagtgatagaagatgagaagtctatttttaataaaggaccaattgcagtaaagttgacgaactccggtcatatttcattaacgaatacaagtttaactgaagttattcatggggaaaaaactaagcgtgaaattacagaaaatcaatataaagagtttttatatactttatttgctattaagttatgaataataaagatagccggttcttattcagaagcggctatctttattattttggtgtaaatggttttcttctaatatgtttcggaaactgcggtatagttaatgtttttaatgtttcctccgcttcttcatatgtatgaaaaattggttcttttccatcatccccttgtaaaactagcccttcatctcgaattacatatggcataaaaccaccccatctagtaaagaattatgttcttttgcagcagaataatacgatttaaagtttgattttcttaatacatataatacactagaacagtacgaaaaagtatgtacaatgaattttgaatgtaaaggaagattattatgtcagttattgataaattgaaacttaataagtatacaaatatggtcgttattaacgaaccaagtgattatgacatttttacaggtaaagaaactgcattctcaaaagaacacgatgctatctttatatttgtagaaacgcttgatgaaatggtgaaacaaacgaattttattattagtaatgaagaattactaattgaaaaaggttacgtattcttcgcatatccgaaaaaaggtaatgctcgttatagtacgtttattcaccgtgatgagatgtttccggcattaaacgttggagaagatggttatgtgggagaaagcgacattaaatttgcacgaatggtaagtatggatgaagtctttactgttgtaggtttaaaacgcgagaagaaaaaaacaacgaaaacatctgctatgagtcaatgtgttgccgattatgcagatcgaattaaagatgttgaagcattattagctaatcatccgaatgaacttaagttttatcaaagtttaacgcctggatatcagaaagattgggcacgtaatcttttttctgtaaaacaagaaaaaacacgtgaaaaacgtctagagaaaatgatagagatcctttcacaaggctataaaacaattgaattattccgtaagaagaaaaaataatgattaagaaagtcacaatgctgcaacaattaattgtgatgagtacattgaaaaaagcattccttccattatactaaggaatgttcttatatttatataattagtaaaagagaaaaggtgtttgaaatgaaatcgtatattgtagttggatctggaattttaggagcgtctactgcttatcatcttgctaaggcaggtgcgaatgttactatcgtggatcgccaacaattaggacaagcaactgatgcaggagcaggtattgtatgtccatggctatcgcagcgtcgtaataaagcatggtataaaattgttaaaggcggtgcacgttactattcttcgttaattcagcaattagaagaagacggtgaaactgacacaggatataatcgtgtaggtgcaattagtttacatactgacgagaaaaagttagatcaaatggaagagcgagcttataaacgacgtgaagatgccccagagattggtgaaatcactcgcttatcagctgaagaaacaaaaaaattattcccagcattatcagacgaatatagttctgttcatattagtggtgctgcacgagtaaatggaagattattacgtaatgcattaataagtgctgcgaaaaaacatggtgcaactttcataaaaggcgatgccatattagtccgtgaaggaaatcatgttacgggagttacagtaaacgatgaaacaatcttagcggaaaaggttattgtaactgcaggcgcatgggcgaatgaaatcttgaatccattaggaattaatttcttagttacattccaaaaaggacaaattgttcatctgcaaatcgagaatacagcaacagaaaatatgccagttgttatgccaccgaacgatcaatatattttaacgtttgacaatgggcatgtcgtaattggtgcaacacatgagaatgatactggtttcgatcatcgtgtaacagcaggtggtttacatgaagtattccataaggcattagcagttgcacctggcttagaaaatgctacaatgcttgaaacgagagttggattcagaccattcacaccaggattcttacctgttatcggaccactacctaactttgaaggaattctcgttgcgaatggattaggagcttcgggtttaacagctggtccatacttaggagcggaacttgctaaattagcgctgggacaaccaattgagttagatttaaatgattatgatgttgctggcgcaattgaataatatagggtactgctaacatttaggaagaaccatgctaaacaaattcgacaaggaataagcagttttccctctgttaagagtaacctgtttatgaaaaataaaattctttaaaaatagaaggccgacattataaacctgcattaataatgtagaattgtgatgtcggctctttatttatatttatttaaaacttattttcgagaggagcttaagcaatgagagcgccatatcaagtattgatatttccttattaaatgaaccaatagtaaacaaaagtaccgtacatagtagatatatctactatgtacggtactaattttataacttcatgaagtaatcagttgaacaaatgggtgtcctgctacatcgccataaacttaacttaataggcatgggataacataattgaaaaaatattttaaattttctttattcatctagtgatctttggtaatatttaatttagagatgtaaagaaaagggaatctatattgcacatgcggaatatcttgaaatgattatttaattggatagagacagtagtggtccttgattcttaaggatgcgtttatttgtctatcttaaaatacatggtgtggacaattaaattcccattgctgagcagatacctttgtatatctgcttttatttatgggcaaaaatacatctctattcacacaatcatagagtccctaaattgggggattttaatcagaaatttaatgagaaatcagtacgaaaaagaagaagcactaacaggaggaaatgtctccagtgtatattgtttttgggatacggttcgacgagaattaaaacctgatagtattaaaattcatacattgctaaaacaccttgaaaacaaaggtttaaaacgtgtgccaaagtttctaggcatcgatgaataaggaagagagattcaattcattcgcgaacacggaaaagaatggatttaagagaaaagtcctggtgaattaatggattgtaagtgattaaaaagaaatgccaccctaaaattcttaagttgatggacatgcggctgtacccctgaaggaggactgatgtcgaaaagtctcgcgattgtcgtcatgggaggtcttattccatccacactgcatatattaatagtcgtatctattatttttgagttgatagaagtatggctacgagaagagagaaaaaccggagcgtcaccctatccgtctaactctataacattctgggaggatgtcacgttgataattgatttaattgtcgccaatttagtaatacctggcttgttgtcgttgtggatctggaaatcgcaaggatcgagcttggttgggaccgtaacttgtttgttgactactatgtcttatttcatattttactggctcggggattcctataaagctttgacaattttcggtttaatttggatgccatttatcattttcgcatcttatcgattaataaaaaaaacatatggaagtcctgtatttccacacgaaataggtaaattggcgactctaactatcattatcatgacctcttttatatttatttatttgaacatgactgccttacaatcaactttttataagaatcagaaggaaacagatcacttcatcttttacagctctaaagcggattattcagaggttgtaaagcttgctgataatttagaacagcattacgggcgtatcattggcttacttaaaacagagccaacgacgaagacaaaagtaacagttttttcaaatcaaatcaatctggtatattcgttggggctattttctaatttttggtcattaggcgtatttagcgatgaaaaactatttatcttatcaccgaaaaatcggtcttctatattaaattcaagcattcatgaatttacacatgtcgtactgtctcatattgacagtaaacgacctacgtggctggaagaaggagttgccaattatttagggaatacggatcttaatgtccaaaaagtgctcccaaccttggtttctgcggataaaatacctaactttgacgagataaatgggccagcattcgtgtatagaaacgggtatccatattcctatacgatcgtggaatttttggtaattaaatatggatatgagaaattaaacgacttcattcgacacccagaagaatataaccgaatatttggcgtcagcaaatcagaattacacagtctttgggttgattatttaaaagcgaattatagccactgatccaagattgtttgccgcacgcgtatctctctgattttcacctgtattatgatcgttctcgatgttttccactttccggtacttggtcctgctgttcatacaactatggatataaaaattattttatcaatatttataatgagctttctatactgttggatttatgcaggtttttgcagaataatgatgaatagattatataaagtgttgtattgacaatggcataatgaggattggagattgaattcatgactaacgttgcagttagaagaccgaatttgaatgatgtagatgaactatatttatttttccgtatagttattacgaatacatacaaagatgaaggattgtcacaattattagatgacatagaaaatgaaattaactcaaaaaagcagtatttgaaaagtgactttgatagtaacggagaaagtcgttactttttattagcaattgatacaagtaacgataaaatcattggaacaatcgaaatcggtccagcaagtacattgattaatagttgtacaggtggtgtacttaaaaatttgtatgaaataggaactgtattcatacttccggagtatcagagaaagggaatagggagtttattactacatacaatgtttcttacattacttagcagagggataacagaatattgtttagatagtggatataaaaatgcgcaaagtatatggatgaaaaagtttggaaaacctagctatgtattgaaagattactggggagaatccagtgatcatatgatttggaagaaaagtttacatgatacacctataatatttgaattataaaatgaaatatgcctctgaacatagcttttcttacttatgtatgctattatttatctttataataaaagaggacgtgaatgaacttgattaaaattaaaattcctgaagctgatgtttcaattactgaacgtaaacaagttattaaaggagacgagccaatcattactccaattaatggatttatcgatttccacttgttccctagagataaaggcggcatttttatgttttacaatattaatgacgaacttcttttcgtaggtaaagctcgtaaaattagacaacgtattaagaagcattttgaagataatgtttcaccaattaaaaatcaccgtgatgaagtataccgcattgatgcatgtatcgtagaagatccaacagaaagagaaatttacgaaacatatatcattaatgaatacaaagcgaaatataacgttgataaagtattctacaaataatcaacattaataaaaagcaatcctagctaatatgcaaggattgttttttatttagatttattcttcatatctttctccttttttcaaatgattagcagcaacaaaacagattacacctataaatataagtacaataccaaccgttttatgttttccctcaaagaaaggaatatctgaaataacatttgtcatacatagtcctaaaaatacaaggatagggcccacccaaagtaatacattaccgaattttgtgtgcttccacataataaccctccttaaccctctttacatatatatccataaataaaaagtaaattcatagagaaatatagtttttttcatatcgaaaatttaaccctcatatattggtacaagcaaaagagaaaggagaccatcatgaattggttagaagctttcatactaggtataattcaaggtttaacagaatttttaccaatcagtagtaccggacatctttatttaggaaggcatttgttccgattagatgaggctggcttatttttagatacgatgctgcatattgggactttacttgcggtttttatttattacaaaaaagaatttatatatttaattaaaaacccattttcaaagctcatgttattacttatcgttgggacaatacccgcagttgtaattggtttattgtttaaagacttctttgaagatatttcaaaaacaggaatcacgatcggttgggagtttttagtgaccggattctttctctacatggcagataaacaaaagaatggtcgtaaaaaaatggatgacataacatataaagacgcattaattatcggttcatttcaagctgctgctatttttccagccatttcccgttctggaatgacaattgtcgctgcattatggagaaaattagaccgtgaaactgctgcgtacttttcttttttactatcgacaccagccatcgttggagctatcattttgcaatttgtagacgtttttcaagggaaagcagaatctatttctagtacatctttaattgtcggaacgttatcagcagcgttttttggatacatagccgtttcatggatgattcaatatttaaaacgtcactccttaaaagtattcgcgtattacgtatggggattaggtattttaattttaatgttgcaatttactgatgtattttaagtataatgataaagaagttaattagtttaagatcctgtttcattcatacaaggcaggatctctttttattaagggggaaaatatgtttaataaggctatcgttattggtggaagtatggcaggaaagtttgcagcaaaagcattatcaacttcttttaaagaagtaatcattatagaagctggtgaaagatgggatggaaaatcttcgagaaaaagagttccacaaagtaatcatcctcacgtgttattaaaaggtggagaaaacgcaattgaagaattgtttcctaatattacgaacgaattaatagaagcgggtagtattataaacaactttacgcgtgatttgaaatggcatcaattcggtctatggaaacaaccgttcataggggaagtacatatgattcaacaaagtcgtcctttgctagaatggcatattcaaaaacgaatacatcaaatttcaaatattactattaaatatgaaacattggttaaagggttattggtagatgcaaagcttaacaaagtgtgtggagtaaaagttaaatatttagagacaaacacacaagaagaagttcatgcggatcttgtagttgatgcgagtggatttggctcaaaaagtatagagtggctacgagaatacgaaattaaagtacaagaagagaaagttcgtattgatttattttacgcaacgaaaatgttcaaacttaaagaaaatgaggagttagactgttgtaatatgctaatgtctcctagtttccctgataacccttatggcgttcttattcaaacgatagaagataatcgttattttgttacttttagtggatacgcaaatgagaaagcaccacaaacagatgatgagttttatgattttgctgaaaatctatcaatttctaatgttacagacttcttaaataaggctgagggaattactgatataaagacatacaaaattccttatcaagtacgccggcgatttgatttagtgaataatgtaccagaaggattattagttgttggagatgcgcaatgtcgttttgatcccgttttcggccaaggcgtatcagttgctgctatggaggctcaccaattgcaattacttttgcaagatagaaaacaacttgataaaacatttacacaacaattttataaaaaggcagctactataatagaaacgccttgggatatgacaacaacagaaatatcacgtcacccgcaactaaagagagaattaactacaaaacaaaaatttcagctatggtatacgaagcaaatatatcgactatccgcaagtaattctgatgtttatattcggttagtacgagtgatgaatttaattcgtagtccatttcatctctttcatccgaaagtgctactatctgtattacttaatcgaaagaaatagcaggaatataattgattaaaaaagaatgtataacagttagtaaatcaagaaggagaatatggaatggaaatatacatagagcaactaaagaaacaagatgctaaggatttatttacgtttgaacttacaaataaatctttttttgaaacaatggtaccaaatcgtggctcaaaatattttgaatttgaatatttccaaaaactactagacgatttattaatagaacaagcggatggagattcttatttttatttaattcgtaatgaagaaaaagaaattgtagggcgaatcaatttagtagatatagatacggaaactcgaattagttcgctcgggtatcgtgtcggagaaaaatttactaaaaaaggagttgcaacagcagccgtaaaattaattttagatgtagcggaaaataatgaaattactgaagttcatgctaaaacaacgactaataatctcgcatcacaaattgtactagaaaaaagcggattttcttcttatcaaaacgaatcagatataacatctgtagaattaaatggagaacatgtgaagtttgtacactatatttggagaaatacttcacacttataataaggaggacttattcatgaatgatttacgttatccaattggccaatttacatacaaacgtcctataactgaagaaatgattgatacatggattcaagaaattgaagatttacctaatgaactaacaaaggcaattaaagatttagatcagaagcagttagatacaccatatcgcgttggaggttggactgtacgtcaagtagttcatcacgtcgttgatagccatatgaatagctacatacgctttaaattagcactgacagaaaagaatccaactattaagccgtataaagaagagaaatgggcagagttacctgattcaaaattaccggtagatgtttcactagtaatgctagattcattacataaaagatgggttaatcttttatattctctagaaattgaagatttagaaaagacatttaaccatcctgaaactggtgaaacaaaacttgctgttgcaataggactatatgcatggcatggtcgtcaccataccgctcatattacttctttaagaaagcgtctaaattggtaacatggagattatattagaaaaggtgacagaaactgatgcagaagttatatttcaaatgcaaatagattcatttagctctttattacataaatataaagactatgaaacaaatccagcaaatgaaactattgaaaaaactatttttagaataaataatcccagcagtaatttttataaggtgataatagattcgaaacttgttggagcgatatgtatatccgcaaaagaactaccttataaattttggattagtccaatgtttattcatccaatctatcaagggaaaggaattgctcagaaggtacttattttaattgaagaaatgtttccagaagcacgaagttttgaacttgctacgattttagaagaagaaagaaattgttttctatacgagaaaatggggtataaaagaacagaagtaataaagaaattaaatgataaaactacacttgtttattacaaaaaagaaaggtaaagcatttaaaatacgctttacctttttatgttattttagattaaatatacaaaaacaatgtatgttcttccaaaatactcgggttagtaattttgaaaatgaataaagatacaaaaaccactactttgtcgtaaaggttactagcgctttttgaatgcttaaaatactatcgtcacctttaaattctttcgtaattggttcctccatactagacacccaaattttaagttctgcatctaaatcaaaatgcccagccgtttcgatgctatattgtgtaatacttttataaggaatagaatggtattctgtttttttgccagttactccttgtttatctactaatataagacgacgatttgtaaatacgattagatcacgaattaatttataagcatgctctactttttcatcgtctagcataatcttctctaaatcacgttctacattttcagaactcgtatttgatgcatttcctaaaataccgctaaataaacccatattaaattcctcctttaatatatgtggaatgaattacttatattgtaccatgttactcacaaagatattatcacattactttagtagtttctggttattgttgtaattagtttatataacctcatcttaaaatcttatgctaatatgaaattaagaaaaaagaagcagagggatatagaatgaagaatatcggtttagtattagagggcggaggaatgaaaggtttatatactgcaggtgtactcgaatatttcatggaaaagaacttattctttccatatgtagtcggcgtatcagctggagcctgtatgggagcaacctatttgtcgcgtcaacaagggagaaataagaaagtaaatacagagctagtatcagattacaggtatatatcttatcgaaatttaattcgaaaacgtgaattatttggaatggactttttatttgatgaagtacctaataaaattgttccatttgattttcaaactttcttaaactgtaatgaacaatttgttatagggacgactgattgcgaatcaggacaagctgtttattataataaaacagaacatggaaatgatattttaaaaatcatccgtgcatccagctctgtgccgtttatagcacctgctgtagaatatgataatcgaaaattactagatggaggaattatagatcctataccagttttaaaagctcaaactgatggttatgaaaagaacgttgtaattatgacaaagccagaaggatacgagaagcagcgaaataaattttctggtctagctaaaattctatatagaaaatatccgaaaatcgcagagaatttagtagaccattatcgtttttataacgagacgatatcttatatgaatcaagaagaacaaaaagataatttttttgtaattcaaccaagtgtacagcttcctataagcggaatagaaagaaataaggaaaagctcgttaatttatataatcttgggtatatcgatgctcaatatcattatgaaaacttattaaattggctagagaaataaaggagtggtaggtaaaaaggttatttttaatgaattgcagaacatgcctagtctactgtataaaccgtttccgaattgtgacattcgaaaaataagaaaagattttaataatacgtttacagaagatgattgtataagcgctgatttaaattattattggatgcatacagcaggtactttaagttacgtgtttaataataatgaacaggagattgtgtttaatcaaattaagtggctaagaaaatcgttttttgagtggtttccgcaatatcgttttctagaaacagagattataaattatcccattttatatagagatttcatgaattatgaaaaaacccgtaagctattactttattatcttactgaataaaaattaaaacgtacaagtgatgctgtttgtacgttttttgttcataaaatatacaatattaataccttgtccatgtaggtattttaacgagaaaaaagaagtacatataaaatatgtaagagggaggagatagaagcttgttagctgttttccttccaattcatgtccaactcaaatatttcgagtaaaattcgcttctaaatggtattatcaaatatcaagaaaactaatttagaaacgaagaagggacaggtttaatatgaaaaacgtatcaaatgtagataaagtagaatccatacagtctttacagtcaacaatccgtaaacttgaaaatgcactatctcagatgactcaaaaaggtgcaaatactacattagtgaaaaaaagactcaaagcagctagtatcggcttagctatgttagaaagtatttggaatcaagaaacccatcattacacccaagaggatttagcagacgctcgaaatgttctaattggtttgttgccatcaattgaaaagatttatgttaagtcaaagcttgggagtcctcaaagaacactgttagaaagaagaataaaatcattggaactttctattcaagcaattgatcatctttctaatcaataacttctctaaacacataacttacgactacttttatatagggattctaatgaaaaaattacatatagaatactacaaaggagaaagagaggtgatggagaaggtaccaataaagcgtctgtgttaaaaataggtatggacgtgcagtatagcagtcgttttccttcaaatgattatccatccggaaagattgaaacatattctttttatagttcgattttaaataacacacgtaaaattcatatttatacgcctcatgattattctcacacttcacatcttcaagaacttctcattgtatttgatgggaattcattcattcataaccttccaatcgcaaaaacacttaattatttaatttacaaaaatgaaatcccatcttgtattgctgttgctatagatcctgtcgatcgattagaagagctaacttataatgataaaatgaatgcatttttcaaggaggaattacttccgtgaattcaggcgaagtatcgtgtgcatcaagaaacaaaacatacaacaattgctggtttcagtcttggtggcttagcagctttttatgcaacacttcaaaatccacatgttttcggaaatgtgttgtcaatgtctggatccgtacattggaaaaaagatgattatgaaaatcaaatttaatcaatagattctaatgcgactcatctctattcttacatagcagtaggagaacttgaaaacaaacctcttttaacggctaatagacgtctgtataaagctttaaaagaaaaggaataccaaattacttatgaagagtttcaaggcgatcatggtagcgtgtggtggcgagaaaagctattcgaaggattaagggcattggaatttacaaaaacgacactaaaaaataaaaaggagagagaagctatgaatcaagaagaactagataaaaaactaaaaaagcaagagattttagtaaaagatgaaaaagtttggtcctatacgtatgaggatcatattagttctatcgttaaagaggcagaaaagaaagggtcatttgataatttacctggtaaaggtaaacctcttaatctcgataaagatctttcttacaatcctgaaaagcaactttatagaactttagcaaataatcatgttttgcctaggtggattgagctttcaaaagaaattgacgatttaaaagaaagactaaaagaaaatacaaatacggcagaagcagcggatttaattcgaactattaataaaaaggttttagaacataatttactttgtccaccaagtgcgcaaaaaacgagggtgaaaacggacttttaacaatttttcacgaagctatttcttgctatataattaagtaaggcattttcaattcattactaaagggaggcaaatgtgatgaagaatacgtatcaacttcaaattccgacagaactagagcagtatcgtagtattttagaagaaagtataaaaccgtatgttaaagtgtctggaacattagcagagacaacactttttgagagtaagtttggtggttatccgtatttacctatagatcaagagcatcctaaagactcaaatggacaacctatgatgctacttgcgcagttaaactttgaagaaattccgcatgttgaatatatgcctcaaaagggaatgttacagtttttcgtaagtgctgatgatgagctttatggagcagattttgatcatccaacaatccaaaaagactttcgaattatttatcattctacaattatagaagatttaaataaggtaattactgattttagttatttaaacactttagaattagaagactttatcatacctgaagcagcaaaactgaattttgagttagcttatcaaccagtaacaccaagagattatcgatttgaaatgatttttagtgataacattgattgggaagaaattgttgatgaagaaaataatacagaattaggcgaactgtatgatgatttatgtaaagatcaaggacataaaattggtggatatccatttttcacacagacagatccgagagaatgggaagaaaaataccagcaacatgacatattattgctgcaaattgatacagacgattcattaaatattatgtggggcgattctggggttgctaatttctttatacgtaaggaagagctgttaaatctagatttttccaatgtcatttacaattgggattgttactagaggatataaataaaataatagcaaacaaaaaatcttcctgaaggtgaggaggatttttttatgttaaaaataagcgttatgttaactaggataagaaacaatgagtgtaatgaaagtcaagcctaaataacagaaataacaacaaataatgtgaagttgtaaaacgtgtgcaaatagcaataaattcataaagtaaaacataaaatataattattaatttatattttgtatagaaataatttttctgtataaaaaatttcttgtcgatcaaaaatgtttttgattcgataattcttaattgattattgatttgaatttgctgtgatggatttatagcaaaataaatgataaaaactgtagaaattcgtttagataagattttgtgtaaatctcactaaaaatctctgtttcgtctcattaagtatagtttacttggtttttgatacccgatatcgctttgtccctataactgcctataatatatattatgttaactgtaaaaaagtaataaacttactaagttttagttgtgcttattatgatccccttttccaccgaattagtaatgtgtgattggttatgtatttattcgctttattagctattgataataatattttcggatataaattagattttaaataataaaaatacaattcgtttaatctgttcattttaaacgaattgtattatgatgacgaatatttttttataactagtttgctacagcgattgcttcgatttcaattaataagttatcgttaattaactttctaacttctacagctgaacttgctggtggattattagtgtcaatgtattgatctcgaatatttctcacaatggccatttgagaaatatctgttaaaaaaaatgttaatttgactacatcattaaattttaattccgaagtttccaatgcacttttaatattttcgaatacttgtcgcgtttgtgtagctaaatcgtcaattccaactatttgaccgtcagtgttaatcgctacttgtccagatatgtaaattgttcgtttagcgtttgtaacttcgactacatgcgagtatccaaaagttggtggcatcgtttctggattgataaatttcttttgcaaggctcttctcccctttaaacatttcattttcttaatgttaggttttgatttcagattatcctctatttactaataattatttatcgatttagctgctacatttgtaaaagtgtattagcactttaatttaaagttattgatggattatgtacgtttgattttttttgtgcttgttataattacaccttgttttattaattcttcagttacttttgtatagaaaaagtgataccaccagataaaaaactcttcataagtaatttcttttgagtatctgctgctggcaaagtattcttttaaagatttatcgttttcattaaacaataagactaaatctttactgatccaagatgaagcattacaagtaaatattgaagtttcgttccttttatttttatagatggcgaattatctccagagaaaatcattttagcttcataagctgtatgtaatatattctccggaatattattagtaaacacttcataacccctcccttactagtaaattcattgtaagatttatgtatttactaacttctataaacgaaaataagtatcctctaataatctcaaattaaaaaccttagcatagatatactaaggttttttgtatttttataatgaatgaattctttcatagtcttttttaaattgattatcattttttaaccaacttttaaaagttggttcctttatttctaaaatggaacaagttttagcgatacatttatttttcatatattccttaaggaaattttgttttctctgcttaacagcagattgggttctttttaggtttcgatcttttaattgatctagacttagactttctttctgaaattcttcatattttctatgcaaataaatatctttgtctttataaatccaatttgaaaatagttgtattgattttctcccggttaaaatgacgcgataatgtttattttgatttagtaaatcggctggtaaattgtgattttgtagtacctgatttaaagaattcataaagctatatgatcctcctacaaagcttactgtatacgtttcatacttgacgtaaccatccccatcaaaatatccacgaacaaaatgatgtaaatattcttctggtacaaaaggaaattcgatgttaaatgatttacatggcataattccgtgcatgttcataaggtcgtcttttattgttttgctattaatatttagcatatatacacctgtttttttgttttggtatagcggctgatttgtttttagttctttttttatatcttctaaaatataactttctttttgtgatatactgacgcattgattttctttttgtataacgccgtcagctgctataaatcctaaaatataagccatattatttgaccaagttttaaaataattttcttttatgtcatactttctcttccaattccctatagcgcgccttgggacgttgctgtctgataaaaccatacgaatataccttgcagacacattagcaagtgtagcgatctctgaggtgcttttcccctctgcatatagctgcgttatttcagattttgatagtttacattttgatttcttttttcgctctatgtgcacttacatcctctccttccttttaataatttgagacttatcttcttctataacatataacgaaacgtacgttctttgttgcttataagaagaaatttactaaattaaaaaagtttacatctacttaatattgattttatctgctgctacatggtttttattttgcatataagaataatgaatttgacaaatttatgaaaggtactgcatttaaggtgaaaggtaaaatgatttcgtttaaactacaaatagctacaataacaacatacgtatattgttaatcgtaaaaaggagaacgaatgaataagaaatatacaaaccaaattcatactgatatgagttttaaaccgaaagatattataagtttaatgacggattactttaaaatgaaatcaaagctgcgtcctataaaggatttgcctgttgttttatcaaataaagataatgaagcgttagagagtgttacatggtttggccattctgcttctcttttgaaaatagaaggtaaaaaactgttattagacccgatgtttggagatgcctcttccccatttcccttgtttaatagtaagcgttatagtggtgctttttctttagaacgtgatgaccttcaagaaattgatgcgattatcatttctcataatcactatgatcatttgaattacaaaagtattatgcagttaaaaaatcgcgcaaaacacttttatgttccaactggagttgcacaatatcttattaaatggggtgtttcacctagtaaaattagtgagcataattggtgggacgaaattacgtttgataatattaagttagtatgtgcgcctgcaaggcatttctctggacgtggtatgacagatagagatcgttcattatggtgttcatggcttattcttggtcaagagactaaaattttctttagtggtgatagcggttatgcccctcactttaaggaaattggtgataaatacggtccattcgatcttacattaatggaatgcgggcaatatgatccgaggtggtctgctattcatatgttgcctgaagaaacggtacaagctcatattgatgttaaaggagaattacttcttccgattcattggggtgcttttacgttagcattacacgaatggagtgacccgatagaacgtgttacgaaagaagctaaccgtttaggagttaaaattacaacgccacaaattggcgaatctattacgttaaaatctacagactatcctttatccgcttggtggaaggaaatttaattttaaaatataaaaagagcgaatcctcttataaagaattcgctcttttttctgtatttaaacttatttcactatattggatctcccactatctaatactctatttgctggtacactggacatttcaaccactgtattcatactcttatcagtcagttcaatgagttcgttttcatgttttattttatttaaatcccacaccattccatgaaattcattatgttgaccacttacctgtataatgctttttgttttatttgaaggctgtatttgaaggtttgtaaattgattcccactaatttcatttggcgtagttacttgactatccatataaatcatatttacacagtcttctaaagaaaagttcataaaacgattggcatttatccaagcttgtccggtgctcggttttttcgctactaatttcagtccagtttccattcctacaactttaatattttcgaagttaacaaacgaaatttcattttcttttccagcagagtataaagaaattccggtacctttattcgtttccgtccaattgataatatttatatcttttatttgtgttttgttccaagtgttataatatttatttttaccgtctaaataaataacttcagagttaaatttaggatcgtcaatagttatatacgctccttcaatggatgcgtttttctctagttctaaaactctaaagtttccctcaactacaaattgggatccataaccaaataataatttcacaccttttttaacaatgattggtgacgtgattttatactttttatcatcaagcaatacagttttaattttactagactctgctttattaatagcagattgtatttttattgaatcattttcccctttaaagttttctacatacaagttagtacttttagctgcatagtcttttttgttgtattgataaaaagcaaaaataattaaaactataccaatgagtaaaacaattattttcttcatcgtactcaccccatatcgattaatctatggcttttatattcaggttattattattttgctttgtatttcagattaccattgctgctttgtctattaatcccttcctctatccttaataagctcttactggcgatataagatgtactgctgcagattgctctcctgcttcaatcaatatcggtcgcatagaacctccaaaacttaaagtaatcgtttcttcttttattgctcttaaagcatcaaccataaaacgcccatcgaaagatatatttaattgtttttcaccttgaatcgcatctatttgttgcgtttcagatattttcccaatttgagaagcgtttgaagaaattttaattgtggattcgtttatgatttctaagttaacattgttattagcccattcacttgctaataaacttgatcggtctacaccttgtaatatcttttttctatctacgttaataatcgttttaaaatcatttggaataaggttagaaatattaggatatttcccttcaattagtcttgaatataatgtagttgttccgagcgtaaatataatatgactctctgaaaggtagatatatacgaattccgaattgctgttcattaattttagaagttcactaatggttgcgcttggcacaatacaatttgcttttacatctgaggaaagtaatgtttctcgtatcgctagtctatgtgagtcagttgcagcgcaaattaacttattattagataactctatatgcaccccagtaagaacaggtctagattcattttttgctaccgcaaagactgtttgtttaaatacttcaatcaattgctctgtctctaccttgatttctgcatgattgtctataagcggtacattcggaaactcatctgcaggaaatccatttaaacttaatgtgatttcttctgattgtatcttaatagtttgctcattcttactttttattgcgatatcacttggcattttctttattatttcaatgaaatactttgcaggtacaaccatagttcctacctttaaaatagttgcaatcttttcgtcttcaattgaaacaggaatgaatttttcaataaaaatatttgagttacttgcaattaaagtaattccagattgatctgcagttatttttataccagataatataggaattaaagattttgttgatattgctttgttgacttctgaaagtgcttgagtgaattgtttgtgattaacgataaactccatgtttcccccgccttacatgagataatatttttatgaagattgatgaacgattgttccgttaaaaaaataaggtactgtttctttcttttgtaataaatatagtaaatgttctggtatgcgtaaatacggtgctgctatatgtaattccatccaagtaatctcttcgatttcttttggccttgatatatatgtctccccgccgattatttcgcctagaaaattaaagaaaattgcatgatgatctctttcctcgaaaaaggcttcactgatagaacaaatcccgtttacgtttatgtgtaaccctgtttcttcttttacttctcgaattactgcttcttctaatgtttctcctagtttaactgcgccacctggtaatgtataataagaaccattttcccctttgttttttaccattaagatcttttcattagttttatcgtacaaaatcgcgtatgtaacattaacttttttcatatgtacctcctctattttaaataaaaggaattttctgtcttctattcattctaccattaactccttttaatatatataagttagttaagtcttgcctttaccgctattgttggagttaataagaataggctactgatataaaaaaagaacgtaccttaggaagattatccaaagtacgttcttgcagttttagtataaaaattgattcaattaatactgaaattaataataacctcgcccttattgcatttgtatttcaaatactaacgttaacaaattctatatactttttaaccgtttttctaaataataatgattatgtcctttcggatgatcttcacttactccaattactttatatccatgtttcttataaaaatcaggtgcttggaaactaaaagtatctaaattaattaacctacaccctttttcaattgcaaattcttcaataagctttattaacttgcttccgtaacctttatgcctatattcttcagaaacccatagaaactcaacgtgtacatggtgccaaaaagttattgctgttaccccacctactatttcttctttttcatttcttactatgaaactaaccttttctgaaggtgttttttcttcatctgcaagatatttttgattgtattcaattactttctctcttatgtaatcactatcttcttgtacccactgctgtactattttcattttaagtgtcacgctcctttttacttatctattcaattttataatgaaattgtcctgtctttaataagttcgtaaagaagcaaagttaatggaataaaaaagagccctaacatgaggactctttttaaaattaagctactttccgatgtaaatgttttagttcctttttcttttctacatttggtgggcggattaatattgaaataatgaaggaaataacacttaaaacaccgattataatgaaagttggttgaaatcccccgagtatcgctccaataaatgatcctgcaagcgcaccaaatccgaaaccttggtagacaatcccgtaatttgtactatggttttttaatccaaagaaatctccgacaatagctgggaatatagttatattaccgccgaagcaaaaggcgacacttgctacacaagcaaaatagattccgtaatttagcggaataaaacttaaagtaaagactgacaatcctataataataaacgttgcagagacaattttcattcggccgattttatctgataacgtcccaagaataattctacctactgtattaaaaattgcaatcatagcaacggcgtttgcagcggttgctgcgctaagtccaacgagttgtacaccgatatcttttaccatactgattaaatacaaaccacccatacacgaggtaaataacataaaaaatagcagatatacttgtttcgttcgcatcatttcacgcggagtatagtcattgtgcaatgtttcagttacagcattacttacaattgcctcacgtaagaagaacgatccgattaacactaaaagtaacacgataataccccaatataagaatgcttgtgatacaccaaggttatcgataaaatttccgtttatatatctaaagattaagctgcccattccatacgctgatacagatatacctgaaataagccctttccgatttggaaaccatttaattaaattagatagtgatgtaatataagctgttccatccgcataaccaacaacaacaccagctaataaatataatagtggtaaggaagaaacttgtgaactaagtattaagccgagtcctaaaacaattcctgcagtagcaataagtttccgaagtcctaattttttctgcaattttgctgcaaataaagttgagaatgataaagaaaaacttgttatagagaaagttatcgctactgaattaagattccatccaaacttacttacaaggggttgattaaataaactccatgtataaattgttccaaggccaatttgaacaatgattgtacctagaacaattagtaacggatttatagaagtttgtttcatactaactgtccccttcttttatcttgacatagattttcacagttagtatatccatcgtaaattgcaagatactgtacggaaaatggtaattaagttcatatacacaaaaagacacttcataaagaagtgtcttttgcaggttatatcagatgtttctaaagaaagctttgttaagataagccattttcgaatgcttatgtatatatgttatcaaataatttcttatatgtgatgagacttaagacgtatttttcattcatcatatagtcggatgaaaaattaatattcgatttcatcaaaatccttcggctgcggtacagtttgcatattagctgcatctttaggatcgctataaattgcattttgctctgtatttacatcttttatattttgttttttatttttgttcactttatctttcacttacaatcactcctttttgttataggagtaattatgccctattaccgttactaaatgtatcagcgactaaattactaaattcacgtaaataatataagtaattatcaccgccgtagttatatcttttgttatacatttttgcaacaactacattatattcaggtattactaaaatagtcggtccagtaatccctaatatttgatatgacccttttggaacacgttcaccaagttcgcttaattgtgcaggttcattttgaacgaaccaaaacaagccattttgtggtagctctttatttacatatgttggactctgcaaactcgtagcgatttttataacttcttttggaacaatttgcttaccgtttatcacaccttgatttaaatgaagattgccccaataagcaaattctctagctgagacaaacagatttttttcagtaccgtcatctaccgtaccaatttcactagtcgcgtcttcatttggattattaacaacgtcaactaaattttcatctcgctgaactctccaacctgtttcttgaaaattagcaggcttaaaaacacgctcctttaacaattcaggaaaacttttgttatatagctgataaataagacgtgtcatcattcttacattaatatctctatatgcccatgcttgtcccggttcaaattcacgaaaaattgtcccgtcattcatttcttctaatccgtgcgaatgtgttaccaaatgtcttatcgttgttttaccaagcaatgcaggattaaagtctttaaaatattttatcgcttcatcatcaatagagtttattttcccctcgtaaagcgcatacgctatcattaatcctaaataactttttctagcagaagcaacgttgaactgcgaagatgcggttacttttttattagtcgatgtatttgagtgataaccgctataatgctctaatacgactttattattttttataatacaaattgctgtagcagaactatgatttttttcttttatattctctacccaagaaatcaacttatcatatgtatacaaataaatcccccttaatacacatcaaaattacagtatgaaagaaaagtataaacagtatttacacctttctttcatataaaatattaatgatgtactatatttaaataatccaccagttccagcaattaaagcaaccaaaacatccggcacaacctacgcaaccaccacatctgccaccgccgcaaccgccacagcgtccaccacaacctccgcatccgccacaacgacgtgcatcgccttggatgtaataatatggatattggctttgttgttgatcccaatacacaacattaccagtttgataatcattaaggtttaatgtttgtaattcatgttgaaactgattcattacgaacccctccatttataaatataaatttcgcccaaacgttaaagtttatatatttttgtaaacaaaatagaaacaagactatagactaaatgcgtacatcaacaaaatatgaacttacactaggtgatgtaccttgtttttcagcctattttctttatatttattcgatggacgtatttactataaataaagtgatttaaaaattactaatccaacaatttagtagttcatcacttaactttctttctagtaattccttcactaaaggcattggcatgatttcataatgatttaaggcttctttattataatctattcagtgaaatgctaaatgagactcgctcgatttcggtgttaagtccgtatgtaaatcttgtgactctacttcaaaaatgtgattaatttcatgatggagcacttctttatcttgccattgattttctatgactcctaaaaattgttgtatactacagtttactccaagttcttctcttaactctcttattaatgcattctctactgattctccaatttcaacatggccaccaggtaaaaaataatgatggccaatatattcagcaactaataatttttcatcttttatcatgactgctcgtacaatatgatggaatttacttttcaattgatattcctcctagttattcaatgtatagttgctcaaaatagtcatttagtattggtataatataaatcataggtgtttcatacggatgcatatcattaataacttcaagagcatcttttacaagttctcgtttacactttatttcaactttacattcttgcccttcgcatattcgaccaatttctccattaaaaggagatgcctcgtctaaaggtctccaatatcctttcactgaactataggaaagacaatggtcatattcgcccgttttacatgctccaattttatttaattcatcccttaatgtttcaatatattcttcaggaatgaatacttcaattttcaattcagtaaattgcatatttcatttcacacctttacttcataatagttaaacaaataaacgatatacttgctcaccatcatactcctgtcctaatgatatgaaaccatatcgttcatatagtttctttgcagagatattatctttatgtactgttaatctaatttctttacacgatttaaaagtattttttattatattaatactttcttgtaatgctgcttttccataaccattaccttgctgcgattgatcaataataaatccgttaatccaatacatatctgatgtctctcttacaacagcatgcataacaaaaccaaccataaggtcaccatcgtatatagcgagtggtatgtactctacattgtcaccatctggttttatatatactttagcaagcgaaactgctacggatggaacaaatttcaactgattttctttaacttgtagttttaatgcttcttcccaattttctctcgtaacaacctttaactggacattcaatattgtaagctcccttatatagaggatgtatgtttatattcaacgtagcgaaataattccctttttcgacaacgacttataacataatttttataaaatcttgaatgaatttttctgcatctatttctaaagctatacgggctccttcagatttagagttagggcgaaaatcagcaaatgtttgtcctttcgtatctccgtatgtatctacattcactgtacgatgcgcaaattcaaaaaaactttggttaactaatccacttatagcaaccacatcatgaagcaatggcccttcgatagatggattaagtttttggtatgcagaaaaatagtaatcatacattggtttcattatcgtatggaatggattctttgaattagcttgaatatagtcaaacacatttggtgttaacacagctttgtttgttacatttaaagggaatatgaataaattctttgcttgatggaaaacaattttacttgctataggatctccatacacatttgcctctgctaacggcgtaacgtttcctacttctaaaaaaacaccacccatgaaatagattccttttacatttagcattaaatcattccataaattaaaagcaattgctaacgaggtagatcttcctacatcaacaattgtcaaatcttttccgtactttataagaatcgcagcaatactgccgaaattatatattggaatagataatacattttctggaacatggataggccctaatccttctgctccgtgaatttcaggatagtacgtagtaatttcttctgtaagtggttttgttgcaccactaatgacaggaatgtcttgtctatttgctaactgcaaaatatacgttgcattatgtgcagcatgtatatgctcaacatttccgtatccagttacaataccgacaatttcaatttcgggatgcagtaagccatacataatggcaaatgagtcatcaatacctgggtctccgaaaaataatactttttccaagaaatacgctcctctcacgaaaaaattgagtcattagtaactatgtatatgaaaaaagcaagtatatctatgcaaattttagaatggataatgttttacaaaatattaaaaaggaactagcgtatgctaattcctttcttgagtaaccattctcaaatttaattaattatcgtatccttcataaattgcatcatttatttgattttgtatttttgtatcatcaggtacaggtttccaccaatttcctgtaataaataacatagttaataaattataactatcactaaaataactttctctcttattcttcatccaatcccaaccgctatttacccacttttgattattgctacttgttatacttgcagcaataaacggtgaaacaaatacagcagttgaataactaccaatattagatccatttaattgataaccatccacaattttagaaggatttccattcgttttattttgaatccacgaagaaactttatcagaaatgactttacttcttttctcgccgtacatcgcatagtccattacaattctcaatggtacccgactagcattgtaataatatgcatttgtatattctgactcatctaagaagtctttaggtgcgggttgtggtgggttttttacaacgaaatctgaaataagtcctgtatttggagagtatgtattactaaattgcgtataaacatcgtacaaattattaataacagtaagccaagttttatcacctgtaaattcataaaatgctctaaggtgtgacatcatccaatcagatggtctcgtatcaagtgaacttttagaatcccaatctcctaaatttagtcggttattatttgtaacattactagctttaataccttttgtaatcatgtcttgtgcttctttcaaataattaactgttccattagatccccactgcttatgagcaagaagaagagaatacgcaatatctaaatctccatcagtagcagaatcaaaatgaccttgtgcttttttactatctgcgacaacccatcccattaaattaggattttgagaacttttaaaagttcttgctgttttaaataaaccgtcatagattttttgagcattcgaatcataaccagccattaatactgtaattatcatcccatacccttgaccttctgaagttccaagtggcttaaacccatctgcatcacctgtaatctctccttttatgtaataaccaccaggtaaagaagataaatcatttttcaaatatttctttttccaattatcgtagtaacttcttacagaagcatttaaactttcctgtgtaacatgattcggttttataacacctgcataattaacttgctgcggaaatggtttcatttcctttgcagcagctacttgttgattaactacgggaatagaattttgtactgaattgtccgttacacttgctgcgaaactagaattagaaaaactagctagtccgattcctacaatagaaatacatgtgaaaatttttctttttccattcattatgttgtcagctccttttaaaatgcttactacataaaatgtaacatacaatatttaactgaaatacaaaatattatatttatcaacataagaaagaaactatataaaaaagtatcataaaatcattattgaattacattatacggattgattatttactaaattcctatgtttttcttttcttaatactggtatatgagcaatcacaattccaagtatagtaattccaccgccaattattgaaactaaagttggcacttctcctaaccatatccaagcaatgaaacacgcagttattggcgttaaatatagagaacttgttgcttcagaagcaccagcacgagatataatataggccaatgcaatatacgggagtactgttggaaagacacctaaatatataacactcaagttaacttcaagaggagctgctaatatttcttgataaactccgggtaagaaaataagcatacatacagtactagaaaaaattgtatatatggtaaatggtaagaaaccgtatttttttaagtaagatgtttggaaaacgaaaaatagactttctgaaatcgccgctaataatataaataatcccccgctatttaattgaatagcgtcgccttggctaaatgaaattaaggcaattcctgcaaaactcattacaccaccgatccagccatttaatttcattttttcattcaaaaaaacagaagcaaaaattgccgtcactattggagtgactgaaattattaaacttgcagatccagcattgactgttttttcgccgtaatttaatgcgatgtgataaatagtaaaccctaaagcaccaaatataaaaaatgctgggatatcctttaaatccggtaatcgtagtttgtatataaatgaaaataacaaaagtataaatgaggcgattaataagcgtagtaaagtaaggtgttcaggcgtataagattcaagccccagacgaattgctggaaaagcagttccccatataagaattgtaaaagcatgagcacatataatgcgtaaatcccattttttattatgcatgttttctctccctccttaataaaccaaccatttttaaattaccaattatttcttttcatcatatttaatagttgatacaatgtcttcaaccagttatttatcggaaaaaccaaccactttgaatcttttaaattaacgaaggagttttttatatgacaaccgataaaaaagtgcccaaatatcggcagataatagactatatgaaagaaaaaattgaaaacggagaatggccaattggaagtaaaatccctagtcagcggcagttagcaaaattatttcatgtaaatcgaagtactgtaataactgcgctagatgaacttatggcagatggtttaattcaaggacaaatcggagcaggaacaattgtaacaaataatacatggtcattattagcaactaatcccccgcctgattggagtgaatatgtaaaggccggtattcataaaccaagtaagttaatggtgcgagaaataaatgaagcagaagcaaataaaacgcttatccatcttagtaaaggtgaacttgcacctcatctttttccgctcgaaactatgcaatctataataaaaaacgtcagtgaggaattagattatttcggatacgaagaacaaaaaggtttttatccgttacgtgaagcaataagcaaatacgtaaaatcatttggaatacatgcatcaccgggttctatattaatagtctcgggtgcactccaagcattacaattaatatcaattggtcttttacatagaaaatcaactgttttacttgaacaaccttcttacttatattcacttcatgtttttcaatcagcaaatataaacttatccggtatatcaatggatcatcacggtattttacctaacgacttgttaaaacgaattaaatatagtcaaaagaataatattttatattcaatcccttgttttcaaaatccaacggggatattgatgtccaaagagcgaagaaaagaaatattaaaaatatgtaaaaaagagcagttgcctatcatcgaggatgatatttaccgagagttatggattgatgaatcacctccagctcctttaaagtcaatagataaacatggacatgtattatatattggtagtctctctaaaacacttagccctggacttagaattggatggataattggaccagaacctgttattgatagattgtcagatataaaaatgcaaacagactatggatcaagctctttatctcaaagagtagctgctgaatggataaatgaaggtttttatgaagaacatgtagcaaacgtaagaatgcacctgaaaaaacgaagacaaataatgatacgagctttaaataaatattgtgcagatattgcatcgtgggatattcctagtggtggagtttttatatggctaaaggttgtacataacattccgatgaaaaaactattttcagaggcactatcaaaaggaattcttttaaacccgggacgtatttatgaagaagaatcagatcagtacattcgtttatcatatggatatgcttctccagaacaaatgactaacggaattaaattgctcagtgaattaattcggaagttaacggcataaaaaaatcctcttttgtttttggaggattttttcacgtattttatttaccacaatttcatttcctgccctaataaaataagttcttcataaggatctccgtcaatatttaatacttgagcaaaagcaggttctgtttttaaaccttgttcctttaagtgaataacttcttcccttatatgaggatgctgcattaataacatgtgctccactatcatatgtctatatgcattttgattacgcactggcttaggttgagcaaataattcaaattcaaaaccttcgaattcaaaattcacctttatcgattcagtacctttcatttttttcttttttatgttgaaccctctataagaaccatataaagatctcatttcttgctcaaaaacatcaaagttatatacttccattacaatatctaagtcagattgaggagtatcaattcttatcgggattgtcccgcaaagaacgggattatataaagctaaatcctccataatatttagtttgttcaaaacatcatataccttttgttgcttgtcattccctgattgtaaatatgtaatagatgtaaacatggaagtctctccttcatttcacgtaatacgtgtctcactaaactcaagaaaaatttgtccgtttaaacttgttctagaagtacctttatttcaatatattaaggcgaataaacaatatgtttcaacttttctcctatactgcaatactataaaaataaaaaaaggaggaattattatgagcattttcaacgttcttttagccatccacatattatttggaacgatatgtttaatcaccggtattgtagcgatggttgctcaaaagaagaaaggaaaacatacggaatggggtgaaatatatcatgcatcctatgttgtgatcaccgttactgccattatattatccgttataaactgggataaaatcgcatatttattttatgtagcaattttctcttattcatttgcgatttatggatacctcgcacgaaaaaaacgttggaagaattggcttcaccaccatattagaggtatgttaggctcttatatcggtgctgttactgcacttttagtaaatgtcggtattcatattcccttaattaatttacttccgcctatatggttttggtttttacctacattaatcggtattcctctcgtagccagtgtatcaaaaaaatataaaaagcgtagttaaacttcattacattttcgttactttctgatgattattatgaaaaatcatactcaatgtaatattttttttataaattcaagatcgtattgctttaagttagtcacttagcgctaaataagaagaatccaataacagtattggattctttttcaaatttcatttcaatatcggctttatgcattcaatgatgttaccatttggaccaaaaaccatctttgtatacttgtgggtacttgttttattggttcagtgataattacaccattatagtttaagattgtaataacgaatgtaaacgatccgggtaattcgtaaacatcccatcaacgccccataaaagtaactttttcatatctttttcattatctacagtaaatggatgaacttctaatccgtgcttctttattctctttacataagcggaatcaatatatttatagttcatcccaagaccgatgcagtatgttttatacttttttatctctaattcagttaattgaactgactttttgtaaggtagtaattgtactagcggtaaagtaacatctaaactatgaattttttgcagactttcttcactaaatgattgaataataacgttatcacttatttcgtagtgctgtataatttctaatagcttctcttccataccagcgtattcatctggtgattttgtttcaatataatagtttgcaccattcccgaacgtttcaataatttcttctagtgttgggactttagcatcttcaaagtctttctttgctaaacttggatgcttttcattgaaaaaagaacctgcattaagtttctttatttcttctaatgtatgttccttaactagacccgtaccatttgtagtgcggtttactgtttcatcatgcatagctactaaatgtccgtcttttgtcatttgaagatcaatttctatataatctccttttaattgttgtcctaatttatacgctgctattgtatgttccggcgcatacgcagaagcgcctctatgtgcaatgttttttatatgatttgcttgattaatagctttcgtgtacttacgttcatctactttatgtaaaacgaaagtacctagtaatataatggtgcaaatgattgtaatgatatatatctttttcataatgatgtattaactcctacatgaaagcaatttggatcgaataatttattcaattaaatgtcgattttcaaatacagtcatttgtccaacagattgaaaaccagcctttttataaatattaatcccatcaggtgaagcttgtaatacgcattgagaaactttcaattgttttgcttcttgcagcaagtaattaaacatagtggagccaaatccttgccctcgcattttttctttagttgctatatcataaataccaatactatcttttgtacatactaatgaaccaacagatacgacttcatctttaaaaatccctaaatatagtttcatattttcactattccataaatcgaaagaagcagtttcattataaaatgtttgcacatgtataccttcctctgatgtaccaaatagattagctaacgtttccccaaactttttaatttgtcctaacgaagatgctctttgtatcgtaaaaccttctggcatttttattgttggttgaattgtctttaagtctgctaccatcgcaatattttgttctgcttcttttaagccaagttttattaattcgttttttatagcctgttcatagctattatcccaaaaccaaacacacattggaaacttctttttattatagttgtttatcactttatataatttctcaatgtcttccgttacatcattgtttagtaaagtaatgatattaaatgtatctgcaggtaaaccacaatctacagcaatgtagtccttcgtttcttttacattcatttcatgtacatgacgcgcaatatatgacattttatatgtgaagttatctattaataactgtttataattcattcttttttctcctttcataaaaattcgtattcaaatcgttcagtattaaatataacatatacgaaatgtaactatttctataaaaatatctctataaatcactctatacgctctgaaagaattaaaaatgatataacgttgtcggaatgaaaaaagtggtatataataaatattaacattactagtaattattttaggtattcctagaataaagacctgcggtagtatgtcaactgaaaaacaaaagaatttttagttatcaaaggaaaacatcctattttttcttattcccccttttcgaggggatgggcaaaaacacccgagtagcaatctctgctggatccttttttaacagcaaagaaggtgcaaacggaaagtcaggaagcttacttgtccaataatcttttgctgttttatattcttcgctttgttccatttcatcatagataaacatataatcttgaaaatcaaaagataaagattctaatttttgatttggtttataataataatgcaacaaatcctgtccaacaatgttcatgcttgctccgtccattaataaagcatcgtatcgaaaacataataaatacgtgtcttcttttaaaagaaaagctttcaattcaaacaaaggccattgccccaaagggaatacatggttagtcattcgagaacgctcttcttgtaagcgagcatgttgattcctatcatctaaatctatgagactcactatttcaatctcgtaatcaggaacgctttgtaatatttgctgttttccctctggtaaaattacagctcgcaacattggatgacgatgaattaccttttgaaaactttttgaaagacgattgatatccaatgctgtttcatattcaaaatatgtttgaggtgaaataccgcttaattcaaactgtgaattccgtcctatcatatacgctgtctgaacttctgttaaggaaaatggcttagacaaatctttaacatgagttggtctactttcaaggttttcctctttatgctctaactttacacaagaactcaattgagcgattgtggggtgcttaaaaaaatctgttgtacttatttttaagcagtcttttcttaataaattaattacctgaagtgctttaatagattctccttttaatgcaaaaaaattatcatgaataccgattccctcaatctccataactttttcccatgcacgcactaatttttgttcaatttcattgcgcggagcaacgtatggaattgatacataatccgtttgtgttatatccaacaatctttttctatccacttttccatttggattcaatggaatctcttctacctgaatcattttttcaggaatcataaactcaggtaatttatcacttaaatattttctgatttcaccaaaagacaccttgttatccgatacatagtaggcagctaataatttcctatttccatatacttgatcaacaacgatagcctggtttatttctggatattcccttaattgagtttcgatttctcttaattcaatccgatacccccgaattttcacttgatgatccattctacctaaatattcaagttctccattaggcaaccaacgaacgagatcacctgtatgatacatcatttcccctgccgcaaaaggactcggtacaaatttttcatctgtcagtttatttttaccaagataccctcgtgctaccgctacgccagcaatgcagagttcaccaggaattccaaatggttttaattggccatacttattcaatatataggaatgataattcgggttaggtttgccaatcgtaacttctttggaagtgctcaagtcttttactgttgcgcaaatggttgtttctgtgggaccataaatatttaaaattgttgcttcactgatacaacgaattttttcaaccaaatcaatggaaaatgattctcctgctaataaaatagattttaaatcttttagaaaaatcgccccttctggatcactcaaaatcacttccattcgcgatggcgttgattcccataaatccaccttatgttttttgaccaaatgagacaattcttttgttgcaaactggtcctctgtagcaattactacttttgaaccttgcgttaaaggaagacatatttctaacaaggaaatatcaaaagatacactagcaagaaacaagaatgattgattagcttttactttttctctcattacatttaaaaaatgaactagcgatttttgttctatcattaccccttttggatttcctgtcgatcctgatgtgtaaataacataagctaaatcattaggattatgttctcgaactaaattactttcttcaccttgaaaaagatattctttatcaagatacagtacttcacctgcaaattgtggcaatacttcctctgttcgcttactaagtaaatattttgcttgactatcttgtaacatatattcaattcgttcagttgggtagttagggtcgattggtaaatacgctgctcctgcttttaaaatccccatcataccaataatcatttctaatgaccgatctaccataacaccaataatactttcttttgaaacacctttactttgaagaatagaagccaattgattcgctttcttattcaattctctatatgtcaaagattgatcattacaaacaacagcaatttgatctggagtttttaatacttgcgcttcaaacaaatcttgaaatgattgaaacaagtctatgcccgtttgaaaagtattcaatccttctaacaactctttttcttcttctgcaataatacaaatatctttcaatgccaaattcggattttgtgaaacttgctttaaaacataacaatacgaattggcaaactgttgcaaagaagagaatgaacgggacttgcaagaaatttgaaattcaaattcattatgtatttcattccattttcttcgtatccatagggctaaattattctctgcgtattcttctagcgaattttcattatgtaatccttccatcccgattacaatttgaaaaggagttaaattgtgtttaactaataattcagagagcggatactcctgattttcatacccgaataaagtcgtttgttcaatctcatttactaattgtttaaaggtgtgatgcggctggatttcacttcctaaaggaatcaacttattaagattctcactttgttcaagattcttttcaattataggaataccaatagtaattctttcttgatctgtataatgtgccaaacaaacccttaaagcggcttgaaaccagctaaataataataaatcttgagacttacttattttttgtatacttttactaaattctacattcactatgacttgaacgtattcacaaggtgtttctttatttagttggtaatcgctattaaatttaaatacagaaaaatcgagaacctcggaagataattgctccttccaaaacgcttctacttctttattttcatgaatcgaacttcgatctttaatgtgcatttttatctttatccccctaatattcatttcttctactcgttaattttcaagccaacttcaagcccatggagaaacacttgatgactatccaaacataaaaattgctgaatatcttcaaatttcatatgaccaactgaacaaacccctaaatttaatgtctcagcaaccatatttaaggtagcagtgataatgcctgactcaatacaagcaaataaatatccatctgaaccgtatttcgggatggaagcgttcgcattataaaccaaataaactgagaaggcagattgagtaaataaatcctgattaattaactcatgatcacttttgattacttgatcaatgttgtttacaatcacaagactattttttgatgggttataataataaaatccagctttcatatcctctatacgttttggttttacataaacaaagatatcaatgggatagagcccccctgcacttgcgtaatgatagtatattttttcttccctaacctgttttagagttgataagaatcgggaaaattccgaaaaactaatatgtttttccatatcaaattgacgacaagacctacgttccttgattatagtaggtagctcatttgttgtttcaagttgaatttcggtcgaccgtgcagcaacgtgcgtgcgatttaattgttcactcatatacttatctaacttttctttagaaaagcgaatctggttgctatatggatttgaaaaaatcttttcttgtgaagaaaatacttctcttgggtgtaatatgttacttactaacacacgattttttatcatgagctctatgtttttgtgtgtctcttctacatttcctaatgaaaagcgctctactagttcactgattttcacacctttttgagccataaaataaaaatcaggaaaccactcagacagaatacctgtaaatctcatttccccgatcaaaacttcattatgcaacttctcccaatgcttaatcggagaccagtaataaattttctcgctcatataaccctccataaacgtttaacttatttttgaaatgcaattttctaatttacaaaaattttttcggattctgctccttgtctcatagtgattataaatacatgcactttaacgaaacttgaaaataatgaaataactttttcttcattaaaattttttatttcatcataaaaaatgatttctttttggatatttcacatcctttcccatagtaatcctataaggtataaaccatttataacattgagaatattcatgtatttccaatgtgaaattattgtaatggattggagagcggttgaatatagttattaaatcaaataatgttgagaaagttttatttattatatcgataaaattttatgatgtaatttattacaaatagattaagaaaagagttttaaatttttcttaatcagttagtgtgaaaatatcacatactattacatacaatcgagttacttacatttcatatttaaaatagagaaaagacaccttgaatggtgtcttttctctattttaattccatatactttttacgcctttgttatttttaaacgatttgtaggaattaatacaactctaacatctagttcgttatatgttcgaatatataataaacattatataaattacgaatgtatttcaggtaattttataaataaactcaaagatatcttctcctcctactgtcacaaaagaaataatctattgcttatttcttttattaaattgtaatataattacagtatatgaaattatattacattaactttaaaagcgaagtgagaataatcttcacttcgcttttttcatttgcaatccttattaaatttgctcaatgcagtatttatttccacattcttcgtttttatttaatcggtttctctgtttttaagacaaatgaacttaatgcaggaactttaattttattgtcatggacaacataaagtggtttacttcccgcctgcttgccgtctactagtactttccaaggccctttcgatggaagtgttatttcaacagcttctctatttgcattgtgagccactgtaaagtattcatttttattcccctctattgtataagctacagtatttttcggagcatcaataaatgatacatgtgtttttatttgctctgcagatgtcattcgaaaagctgagtactttttgcgtaattctattaaacccttcatataatctacttcattattaaacgttgcacggcgcagccaatccatctggttaattgaatctggagatttgtaactattataatcaccgtatttcgtccgcataaactcttgccctgcatgtaaaaatggaatcccttgtgatgttaataaaattgaagaagacaatttgtgcatttgttttcgcatttcttcactgtcacctggattagttaactcaagtttatcccataatgtatgattgtcatgtgcttccacataagttaatacctgttcaggatcttgataggtagacgaatttgtatcatagtcaatacctgctgtaatgccttttttaatacgatcttccatgttttgctttccatttacaaaaccattttccttttcctcaaatacactacctttcaacccatcacgtatattatcgttaaaatgagcaatccctttcattttctctgcatttttttgatttgctttcaactcagctgcaagaggtgtatttaaatcccatccttctccgtgtagtataatagaagggtcaatttgattaacagctttacgtatttcattcatcgtttcataatcatgaatacccattaaatcaaaacggaatccatctaaattgtattcttttgcccaatatgttacggaatctatcataaatttcctcatcatttttctttctgaagcagtatcatttcctactccagttccatttgcaaatgttccatcttcattgtaacgataataataacctggaactaacttatgaaaattagattcagcagcattatacatatggttatatactacatccatcactactcgaagattattatcatgtagtgtttgaaccatttgctttaattcagttattcgaacagttggctcataaggatttgtagaataggagccttctggaacgttgaaatttttaggatcatatccccagttatattgcggttcatttaaagtctcttcatttactgaagcataatcaaatatcggtaaaaactgaacgtgagtaacaccaaggtcctttatatgatcaagtcctgtttttacacctcctggcccttttgttcctttttctgttacacctaaatacttccctttctgtttaataccactttcaggttgaatggaaagatcgcgtacatgtaactcataaataatagcatcttccggatttttaaattttggctttttgtttgctttccattttttcggatttgtttcttctaaattaacgactgcacctttatcgccatttacagaagcagcacgcacatatggatcaaccgcttcagcccacttatcaccaattttgaccttatacgtataaaagagccctttttggttcccctttagttctgctgtccaagttcccttttcaccttgttgcatgtttatttcagcacctattttatcgttccagtttttatatgtaactaacttcgcttcgcttgcagtaggagcccataaacggaactttgtatgttgcggagtatatgtatttcctaaatcgttgccaccataataaaataaattatcaaattcttcgctacgaatgactttaccaatttcagtattcgtatcagctaagttttcaattttaactttgtatgtttgttttaaatcaattttctgttccgtaattattttaacctgattagtaatatctccactgtttgtatcataaggagtaatatttttaattttaatgccttcaatttcaattttcttttccttaatatgaaacgggacattagtcgttacagtaatttcattgaaactatcaatagttgctttttgaattgagagatccgatgaaggcttagagttatatactttttcatcacccgaaagaatccatacttcagcacgaccgtcctttatattttcaatccaacgatccccaccatctttttcccattcatttgttcgaactataaatcctacacgattatagtcaccgtctatttttatcttagcgtattttccaaattcatcttcaccagtaaattcataagatgtaccatttgcattttctccccataaccaaagattccagtcttttgtatttccaagcttttctttgtaatgaatgataatttcagttgttttcgaatttgaaactgccttcacactctgaaaagagaaaacagatgataacataatgattaaagtaagtaataaaactgttttgttaattaatctttttgtaatttgcaccacatacaccctttcttcaaatattactaacgatttattatgctttcactgaataaaactgcttaaatttatctagaaatctctttaacttcacctccatattggctattttcacgtatgtatttcaatgaccttttaatacgaaagcgtttgcattaacgcttaaaaaaatagatttgtttatgccttcatatatttgtaaatactaaaagatcagggaaatcattttaaagcaatcgtttgttatcgctttcattttatagactttctatcaagaggtcaatatattattaattttctgtttttatacactttaaaccttattgatttgtcactacttcttaaagagaaagcgcctcattattgcttagtcagtttattttcaataatacattgctatgaaaaaaacagctaatatccttaaaatgacattagctgtttttcataatgtattaatatatgaatgagaactatatttctaaattacttaatttttgctgcatcaaatgctttttgaactgcttgaacttcagctgtattcgcaccatatttattagttgccactcgaatacatgctgatctcaattctttgaaattagaagtcatgtttaactcatctgtatttgcataatagaaaatatcaaacattttatcttcaccaattcctttaacagttactccgttatgagttccgcctttcgcaatgagatacgcaactttattaataatacttgaattaaaatgaacaccgccttgatcccatccattaaaatcgttaaattcactgtaatcatctggataaggtactccaagtgaagatggaacagaagctgggttttccatatcacggaaaacagatcccgtttgttctcccattgtccagttgaattttccattatttacgtatttctcaatagatgttcccataatatcagataatgcctcattaatcgcaccggattctccgtaatattcaagattagattcgctagaagtaacagcgtgtgtaaattcatgtccagctacgtcatatgctttaacaataggatcgccatatacaagcatacttccattattagcacttaatgcattctgccaatttttcggatcattcgtctcttcagaatcccaagcgtgtacaactgaaactactttttgtcctttattatcaaagctattacgcttgtatttatctttataaaaatcaaatacttttgttgctaagtaatgagcacttactgctttcggatcgttaaatgttgccgaagtactagtcgctaatgtaccaggataatagctttcttctttagtaatatctctgtaattcacatcatatgtttcaatgccttgccctcttgtataatcagcaagagcatatttgccattactttgtttagagataccaaatgaacgagaaatacccaaatcatcttttcctgttccagttaatgatgtaagactgctttgtttacttttctttaaagctccaactagtttgtcactggcttttaagttagattcttgtaccatattttttaacatatcaccattttgtgcatttactaaataagtaccagaaacatagtttggtgttgcagcttcaaaggtaacttggtatgcatttttagcttgtccattattttcatcaacaaaaataacctctttaacttctggctcagaaataaacttgagatcgttcccgtacttcgtataaataaattgttttgcttcatcttttgatagattaataggttttttcaattcttcttgttttaaattttgtgcgctatcacctgaaacacttttaataacaccattattatctacgtgtgcagttaattgatggccatatacttcttttccttcgtatgtttgttgcatacgcacaagtgtagttccatcatacgaaccacgtttttgaagaactttataatctactcctgcttctccattgacttgtttttgggacagagcttgctctgttttctccttaagtgcatcctttactacattttctggtgccttttgtgacggttgtgtaagttcacccgaacggaacgattcctcttgaatttggacttgtagttgatctgtttcctctgcatgacctacgccatatggtgccacagctgttaaagctaatcctgttgttaatgctaccttagttaatgtctttttgtttttcattatttcacctcgtataatttttgaaatagaaagcttgtacaaagtatactgtctatttttgtcggaaaaaagagaaaatacgaaatttatgtaacattatgcaaaattacataaattgtggtcaatattataaataatgaacggaacacatatgtacattaatttgaataaaagagaatccttataaacgctcatccaattggttagttattaattatctatattcattctaataaaagtatacttacatctaaataacaacataaaaacccactctttactattgtaagagtgggtttaatgctattaaaataacaattactataagaaaccttataatttatatttttttagtaatcctattaagttttttataaaattcaccttttgtctttacatgattaaactcatttggattaatatttgctttttgtgagagtgctacaatttcttcttttgaaattgagtctttcgtatttatagatgctatatttgtgtattttccgtcttctgtttttggaatttctaaaatccctttattcacgagatcaactacagccttatgctctgaagaatgtaaatctacaccagtaattttccaattacgcataacttttggagtgtatacaccattctttacctcttttaaatatgtaatagcaaggttacgaatggttccgcctgtttctccaaatgcattctcttgtttagatgaccaaatttgttcaaacttacgcccctctaaagctcccccttttgcctgaagagcctccattctatatgcattcattcctagcgtcataacatcgctcattttgattggtttgtttgtacgaatagagcgtaaatttgtaattctgcttccatatggttttgttaagtcaatttcgtattttacgcctccaaagaaatcgttcgtactgtatttagatgcacggcgggttttatcaaagctaacggttacatctccggcacgagatgagttaaaatatcctgctgcccattccatatagtcttttaaatcttttccagaaatcttatatactgtaatttctcccaaggcatattggtaattgtacgcaatatcttttttcttaataggacctgtatctaaacgggcataatcattatcaatttgatgggctactacatctgctttactgtagtagagcatgacttcatgaaagaaatctgataaaggtgtttcttgaatctgaacacttggaataccctttatttcattttcaggaacaagatttctaccctttaattgagcgactacaacatttgcatctcctctcgcatattcgtgaaaagatgttaatgtttcttcaagtgtaggatcagataatatcgttgttccatcagcattttttacaggtatagcggtagcagttttattttttaaagtcaacttcccatcttgctttgtaaaagtaaggtcaatacgtgaaatatgtgttccatatttatctggttctgtaataattacgccatttacaacttctttttttacaagtttatgcatgtgagccgcaaaaatagcgcttagttccggacaagcatttgcaatatcttgaacaccagtaccagggataccattctcattttctaatcccatatgcataactcctaccattacatctactttaccttctaattccttaattgcctttttcgtctcttctaccggatttttcaccactaaaccctctaagtgatctgtccctttttcaaaatcactaatcattggtgtattcataccaataatcccaactttaattccacctttttctacaattgtatatgcaggaagaaagcgctctccattttccttataaatatttcctgctaacgtttttcccttatattgctcactaacttttttcaatgtatctaatccaaaattgaattcatgatttccaaatgcccaggcgtcatatcccattgtattcatcgctaccatcattggcgattgtggtttatcgttgaataattctactgagtttccttgaattgtatccccagcatctactaatatggtatttggattttcttgacggaccttctttataaccgtataaagctgcgtcaaacttccactcatatttgctccatcaagcgcataatcccaaggcataaatctaccatgaatatctgcagtacctaacaatgtgatattaacttcagattcctcagccttagagatagatggtttgactattactgctgttccaagcagtaatagaattacaaagtaacatacatagttcttccatttcattttttgcataataataatatttctcccctttttgtactttcataaagttgcttgaactttaaaaatgtaacttattattcaggaaacttcaactacaaaagataattttgaaggtggttctgttgcaaaataaagagaataaattgcatacatcccctaacagaattgtattttatcgtttcctgacagaataccccttccttaagcgtgtgaagagtactttcaaaataaggacatatcattcatcatcataaaatcattatttcaatttactaaaattcgcatataaaatatgttatgatgattatttttttgaatttcattgtcgaagtatttccttctcaatgaaaatacttccaaaaaaataaccccgctcttcatttaagacggggttacacttatacagaaaatcggatagtttcatattttcttaagcttattggttactttcaactaatttcattctatttttgttttcttctgaatcaatatgaatcaaccgttttccctgtttataatacgcatcaataaatagggaatgatttttacttttcaatttcacaaagtaattttatctcttttatttgtgaaatatgacgctgttcatgtaaataaatcagttctatccactgatcaagggataattctccaagagctggatgcatcactgcttttttcgctaatatagactcatcttctattgtactcaggaaacgcatcaattcttttcttgattcgtttagcgtattgagcatttgctccacttcaaatggttctatacttggttcaatcatttctggagctataaactttttcgttctatctaataaaatagtgtgaatttctttacgctcattttgggtactatctaacttttttaatcctgatgaaataactgttataactctctcatctaataaaactaaatgatgacaaacttgtgcaatactccatttatccttatctggtttcctattaaattgagcatcactcaacaaattaatttcctcaactaattgatctctcgttttataaaacttgtcatttacaaatgtatccatgtggattctcctttcattgcaacctacatacttaaattcctacgctagaaatattatcttcaaaaaaagtttttctttcactactattccaatttcattttaaagctacaaatgaaattatttgttttttatatctttttaattggcacaaataaattaacctttaactttccgtctagatcttcagcaacattatttaagcaaaactctaaattatctctatcataatctgcatcatactcactatttggtagccactctgcatacatgtattgatacgcttcacttaatttatgaggttcatcatagaactggtatagaccatatgtacctccatctaatcttttaaattgcacatcatgatgcttttctttatcgaagttttcaggaatcgtaacacatgcatcatgccggcacttatgacttgcaacaagttcaggattatctaatgatattccgataaatgattgctctggtggataaagtttattttcaattgaccaattcagtaactttccccagtgatcttgtggttcaaagtagctaccagttcgtcttatatatgctacttctaatggtggaaatttttttataaaaactttcatttacatcttctcccctataaatatgtacactgtttatttagctttctttaaatatttattccttcttaaataaaaagaatcctctaatcacatgaattttaattgaaatacaattgattactattactactactaaagtagtatgtactttcatacttttatttgattttaaattctttttaaatcgatatattaattgtaagaaaataaaaaggtggaggattttaattgattaaaggaatatacgaagcgcatttaccagtataatgtcctatcaatttatcattaaataaatgtaaaaaataaccctatttattcatttttaatgcgtatgtatgtacatttgttaatttattcgatatattatgggtattgaatgattacgtgaagtgtataggtcgcttatataacaccttatatttttatatccgtgaaaactacaaagtgtatgaaaatccatttgtcaaatgaatttagtgcggaaggaggtttgtggttacttcatagggtataataatcagttttttactgataaaaatataggaggcgacataatgtttcgtacgatttcaaatttcatgagagtagctgagataagaaggaaaatcctttttacactagcgatgttaatcgtttttcgaattggcacgtttattccagttcctcatactaacgcagaggtattaaaagtacaagatcaagctaacgttctaggtatgttaaacgtatttggcggaggagcattgcaacacttctcaatcttcgctgtaggtattacaccatatattacagcttccatcatagtacagttactacaaatggatgttatacctaaattttcggaatgggcaaagcaaggagaaatgggccgtaagaaatcagctcaattcactcgatactttacaatcattctcgcattcatacaggccatcggaatgtcttatggctttaataatatagcaggtggacaattaataacagatcaaagctggactacatacttatttattgcgacagttttaactgcaggtactgcatttttactttggttaggcgaacaaattaccgctaacggagttggtaatggtatttcgatgattatcttcgcaggtctcgttgccgccattccaaatgttgcaaatcaaatttatttacaacaattccaaaatgctggcgatcagctatttatgcacataataaaaattgttttaattggactcgtaattttagcgatagttgttggtgttatttacattcaacaagctgtacgtaaaataccgatccaatatgcaaaagctgtttcaggaaacaatcaatatcaaggagcaaaaaacactcatttaccgcttaaagtaaatagtgctggtgttataccagttatctttgcttctgcatttttaatgacgccgcgtacaattgcacagctcttccctgattcaagcgtatcaaaatggttagttgcaaatcttgatttcgcacatccaattggaatgacactttatgtcggtcttatcgttgctttcacatacttctacgcatttattcaagtaaatcctgaacaaatggctgagaatttgaaaaagcaaaatggatatgttcctggtattcgtcctggtaaagcaactgaacaatatgtaactaaaattctataccgtttaacatttatcggtgcaattttcttaggtgctatttctatattaccgctcgtattcacgaaaattgctacgttaccaccttctgctcaaattggtggtacaagcttacttatcattgtcggtgtagcactagaaactatgaagacgttagaaagccagcttgtaaaacgtcattataaaggctttattaaaaaagtgaattaattattaaaaacacagttggttatttttccaactgtgtttttgattttatcagtcctgtaacatacagggctattgctttattaaattacatctccttctctaataaccgcccttttttgaaataagtccgtagtgttgaacgattggccaaaaatacaccaatcaatataagacaagcccccattcccattgtaggatttaaaggttctcctaaaatgatatatcccacaattattgcaattaatggtgatacatataaccacgtcgatggaaatactggatttgtttttgataagagccagtaatataatccgtgtccaccaatcgatccgataaatatgagatataaaataggccattgcacactccatgaagttaatacggttacatttggttgttctacaataatagatgcgattagtagtaaaatccctccataaaacatttgaataccgttaataagaaatggtgatacatttgataaatctgacagtatttctttcgaacgaatagagcctattccgtaaaataactcccctataactaacacaatacaagcaatactccatatgaaacttacttgttgatgcattcctggtaaagaaacaaatataacacctgctagtgcaataactaaagcaacgagttgttccatttgtaatttctccctatccctctttgcttgtattaataaaatcatcattggtcccgtagcagaaagaacagcagctaatcccgaagaaatatattgttctgaccaatataaacttgcgaatgtcataaatgttaaacaaaatccagcatacataatgcgttttgaaaatatatgtggcataatttcttttcgctttaatttaaaaataatcataaggattatgcccgctaaaaagaagcgaattcctgctgaaaacaacggtggcgcccctgcttcaattccaatttttatcgttaaaaatgttgtcccgaaaataatacatactaaaatgtaattaaaaatgaccattttgcttcctcctttttactcttagaatgagtatagaggctatggtgtataacagtgtatcggtacatataacagttacttcaagttgtagttgattccctatatatttttcgctttaattaagttaaaaagaaaaataggtgaacctatgaaaattgtattgcgtaaagaaacaaacataccgtattacaagcaaatatatatgcaaattgttgacagaatacaaagtggtatgctttcacatggtgaatctcttccttctttacgttgtatggccacagatttacaaatcaatgtattaacagttcgtaaagcgtataaacagttagaaacgaaagggtatatacgcatcgaacaaggaaaaggtgcttacatatataaacgggtaaagaaagatttcaaaccaattccgtataaatggcaacaaatgaaaacgattaatgttatgcgttctcaatatgcaatgaataagcaccgtaaatattataatttttcacaagcaattctgtatcctcgtctgttaccaaatccatttttggcagatgaaatgcataaattgctggataaaaatccgatgttgttagcaacttatgggccagttcaaggcgattatgaattgcgagttgaaatagcaaattacttaaatgaacaccagaaattagtgacagacccatctcaattattaattacaagcggcgcacaacaaggaattgatttaattgctcaaacattattaaaacctggagatattgtattagtagaaagtccatgttacagtgctgcgcttgatattttcatcaataaaggtgttcaaatcattcccgtttctcttgataatcatggagttcgctccgacttaattgatgatatttgtcaaagtaaaaatcccgttttattgtatacgaatcccaccttccagaatccgacaggtacagtaatgagtaaagaacgaagaatggaacttatagaactatcggagctatatcaattttttattattgaagatgattctttcggagaaatatattttgaggatgctatagtcccgcccccaatcaaaagttttgataaagatggccacgtaatatatataaaaggatttagtaaaacgttagcaccaggactgcgtatcgcagcacttattgccgatggccctatttttgaatggctatatgcagtaaaaggttcgatggatatcggtagtcctttattaacacagaaggcacttctaccatttttacgtgcagaacgtatgaaaaaccatttagaaaaattacgtacagctttacaaatgagacgtgatttaacaattgatatattgtcgccattaaaagaactacactttgaaataccaaatggaggttttaatttatgggtgacactgcctgattcgatagatccctttaccttattacaaaaagcaaatgaagtagatgtctcttttttaccaggaacagcttgtctattaaattacgaaacaaatgataaccaattaagaattagctattcaatgttaaacgagaaagatatggaaattggattagaaaaattacacgatacaatacgaaacagtatttgttagaagtaatatcacaatagctaacaatagctaacaataaataatactcgaaaatgaaaatgtatagtatgggatattatttattgttgagctttttcgttattctgaacaaccggttttaaaacttgtctttcttttaattcttcaacaataccatattgatcaataacaattgctttcatttcctctcctccttgctgtttattttaataacatacaattatttctcaaaattttttgccttgaattaacatataattatttttgggggtaattatgcaagaagcattataaagtgaaactttaatcaaccctcgccaatcgggctttttcgggaagttggtcccctcccaacttctttactttccctgaattttaagatgggactcttactgtccagcaaatagcgggatgaattccaccacgaatcttacacacatcttagaatcatccaaaattgttttattaattaaattcaaaagaaatgaggctaactatatgagtgaaaagatatttaaaataaacggaattgatatatgtacagaaagctttgggaaccctaagaaccctgctattttattaattatgggcgctacatgttccatggtttattgggatgaagagttttgtgagctgttggctagtacggggaagtttgttattcgctttgataaccgtgatgttgggcgctctgttgcctatgaacctagaacttccaattacacagtaacagatatggctgaagatgcaattggagtactagatgcttatcatattgataaagctcacctatttggcatgtcattaggtggtatgattgctcaaattgccgctgtaaaacatcccgaaagaattttgacgctaactttactagcgactagtgtaataggatctgatgacaatactcgcgatttacctccaatggatgaaaggattttaacacatcatgtaaatggcacaagtatagattgggcaaataaaaatgatgtggcagagtatttagtttcaggatctcgtctattatgtggatcagaacgaatatttgatgaaaatagagtttataaacaagtaaaacaagaaatagaacgcgcaaacaatttattaagtatgtttaatcacgctttacttcaaggtgatgatgcatatgaaggtgtacttcaatccatacaagcacctacattagttattcacggaacagacgatacagcactaccatttgaacatggcctcgcactaattgatgaaattccaaactcagtactattaacccttaaaggggcaggccatgaaaaccatccagatgactgggaaagcataattaatgctgtttctaaacatacatctaaaatttagataaataactaatggaagggtcacaaattgtattgtgccccttccatttacaaacaaaaccccatcactgtattcgtatgtatagtgatggggacttcttatatttttctatgtttaaaaaaatggacaatctaattgatcaacagattcccataattttttttttgcattttcagtggatgtatttgtgtctagtgtcatgtttttaaaagggtttacttcgacttttaataaggatgaaggctccacatataatgagaaaacatggctgcttggtaaagctttagaaacgtcaatatctcctacttgtttaaatagttgctgtgcagcaaagaagaagaaattagttggatttgattgtttattcagccacgcaagcatttcaggtgataccgatttatgaatattgatttttactcgatcaccacgtttatatcgcctagatcgcatacttccaccaactaacttatcgttaagtttgtaaatcctaactctttttgcttatgctctctatattttggcgaacaagtatagactaataatcctcgtgcatttgtaaataacggattatctacaaagattacatttttgagtcgtcctttttgctttaaaatcatttttaaactgtttttaataattactgcacccccgccataaataaacacgtatggatcgtctttcatatcatcaattttatttataatatctgttgcaacacgcgctgctaaacctaatagcgctggctgtgattcctcaactaataatgtatttctcggatgcttatcatttaaataaatttgattgaattctgtaatgctatcaatcgttttagttggatacttccggttccatctcgtaatgatttgtagtaacgtctcttttacaccataagataaacctttacttagttgcggacggaaattcacccctaatgaaacgacttcttctgtcgtccctgcgccaatatcaaaagagagtaaagttttatctacaaaatcaatttcagaaacttgattttgctcacattctattttatgtttcacaacatttccttcttcatcgtatacaatgccccacgtcccagaagcaccctcaggtaggcatttacaatactcaattgaaacattaattgtcacatcgcgtccgttcggataatggaaaataaccttatgatttcccatataacgttttgcattttcagcagctatttcttgtgtaataagctgcataggaagagcgacagataaatcataacgaatattaatatggctagaagttggactttgacgcatagcgcttaccgccaaacctgatagtattgtaataaccattaactcatccgttgacttatttgatttcttctctacctcagtaccttttaattgatcttgaatgactttttctccaacgatgtatcgtacattatttagcattaacgatggagaacttatagtcacatcaatgtggttttctaattcagataatgaaacatctacctcatctaagagtcctgtaggctcacctatatataaagaataaatactcggaataaaaatagggtcttgccctttcaccattaacttcaaaccgttgtttcctgcatctgcaccagcttttaaaagtatagacataactaccccctaaattaatctgacatcccttccaaatatatgcgagcccattcttttacattcaaatgtattgtaattttttatttatcatagaactaaaatattacatacttacatatttcgtgtaaaaagtatttgacatgatacttttccaattttatacttatatttgtaaagagttttttacaatcgagggggcaattatttattgaatactaaaaaaactatttttataatcattgttttagcattaattgcaatactagtacatggcacatataaatacataactgaaggttctattttgggcggtacaatttttgctatttcgttaatacttagtaatttaattaattacattacttggggagatccccacggtgtatcagaagaaagtcaagatgaaatgggacaacaaattacatataaaagctttaaaattgcatattttgtgcttgtaattgtaatgttccttatattaatcttctctgaaggattttctatgggggctaatttagatggagtaaaaaacctccctctgttcatcgcaatttgctcttccttctttatttatcctattgtcgaactcgtagttgcaaaacaatataaataaaaagatgaggttttctacatgtagaaaacctcatctttttatatttacataccctctacaattgcttttaatttgttcacagtccgccaattcctaactgtagctggtgtatgtaacttctgaaactggttcattaatttagaatttcgaatgctatttttgaaaaacaaataaacgactttctcatctatatagcaatcttcaagttcacttttaaatataagcaattgactactctcttcttcagaaagtacattcgctaaaaaagcaacatgaacactttctccttctaacaatgaatgaacttcatacggacattgcttaataatatttataaattcatcatgtgttcttagcatgactggaacatcgaaatcaaattcattttttatttccgtttgtattcggtcttttagaaagtttatatcttcctcagattcgaacacgatattaccactttgtatatacgttttcacttgttttaaccctattgattcaaacactcgttttaactcagccattttgattactttatgtccaccgacattgattcctcttagtaatgcaatataaagtgtcatactattccccccacaataaaatgaacttatcaattgaatcgatttccccactcatatttctcggatatttgttttaattcttctaacatatcatgaatagataatacctcaaataaaataatatactcacttgaaaaatggtgatgataatgatttggtttataatcttttaaatcatttttataactccaagttgagatattaaaaaattcacaaactaacactgtaagaaaaactgcaatcccagttttaatcactcttcccccaacgatattccattttctatcttgatttattttttatatccttcatttctatttcattttatatacatatattgtatattattaaaataaaaaaacctactacatgaatattcaagagtaagttttctatctcattatttcattatagacaaatgcattattatttgttggcctattggtcccattcttctaaaacctttatcttggaagccgacttttgcatataaattttgtgcaggaatatttctttcattcacagcaagtacaacttcattttttattggaaaataacgttgtacaaactcttctaataataacaatgactttttagcgaatccttttctttgtctattgtgattaatagaaaatgatgttaaaagtaaagcatcctcattatctgtgaactcctttactctatctcccgtttccaatgcgaaaagacccaccggtaccccattgtaatctaaaataacaatcacattttttgtacgatcactttttgctttctccagtaatgcgcttggatctgatgtaaactgaacttgttcacttggtaaagtaaatgtttgtataacttctttatatttctccttatacggaactaattgaatttcccctgtgtgtatgttcatgctaaactctcccattttttagcttattaacttataccttgctgtgcttttgaatgcactcttccatctaaaaaggtaatttcaacaaatgaatttggattgtttcctttccaagcaaaaatttgtttaatttgtgtagaatgttctaccccttcttctataagtaaatctccttcaaaaccaattaaatctttcacttctgtataagtcatcccttcatttatactcgaaaaatgatttatattgatagactctttctgttgcctttccatcacagtagaagaagttgctgtttgatttttcacttcttttctctgttcacacgctgtcatactgaaacctaagcataaaccaaacaatatacatgcgctttttttcatcataacagttgtccctcccatcataattaaaccatatttttccttaaaaataaactgaatatttaatattatatttaaaaacctcgtacaattaagtacgaggctaatttcatttattcaaatgattatttgattgatcattctgttcttttcttaactcttgttcttcatcttttggtaattgtttatcattatccttaattggattcgtttctctattttctatcatatcatttggaacttgtggcattactcggcccacaatagcggctaattcatctagtataccttcacctgtttttccttttttaatttgctttccaatttgtttgagccgttcatacgtatcaacatctgctacaacgactgcattagcaccgtcagggtcattttttaaactttctgcaacagagtatttaattgattcaactcgagttcgatcaagttttgcttttacatcaatacctacaatagcatattttccaacaacgaccgcggttgcatcattcacacctggcacacttgccgctaaagatgctaaatgatctgctgctttttcatttggcttatttgatttattcgtataattaacatttttcattgaaacatttttttgttccggtttttcgtttggattgtctttttttccaatactgcatccagttataacgaagcaaagcatcaatatatatattagagttttcattattttcaccacttcactattaaggtttaatcataaattttttcaacagcttgcattttctttaccttttcctcggccccgctattagcattaatgaatatttggtacgtatcttttcctaaagtgcctacaaattcatagcaaagcacttcattatgcaaatcattgactactaaagctttacgttcttccatgacttttacatccggattgattttctttcttgcttctgctgcagttagctttgccgatggaactgttcgcttttgatgtgacgctaaatattcttttgcggagaacccaacgatagaaccatcatctaaagcaattttcatttggattgcttctggataaattcgtactccattttcatttactacatacgtaaatacaccaacattatcatattgagagctatcataaagctccatattattaaacttatggtcctttaaaaatttcaaacctttactacctgcatcgtttaaactaactttctgttctttaatttcgcggttattcataacccaaattggatatccgccttttccggtaatatccatatagaactcattattcgttgcttcatctttaattttcacactatagaaggattctttcgcaccttttccgcttttctctacatctactttttcatttccttttaaattcagaaacgattttgcgattttcgccgcttcatctttagaaattgcctttccttccgcttcaaatccgccttttttatttttttgcgcacttgtaaaggtcggtccgaagtttgtagaagaatatgatgttacgtttttctctacagttttcaatccatcaataattgtgttatctgctggatcgcgatttgatgcaagtgccatttctacatccatccagcgtaaattatttttcaaaacaagatgttgtacttttcttagttcatcttgtatatttcctgcatttgaatataaagtttgtagcgttttatattcttgctcatttaacggctctttttctaaatcacgaatggctgcacggtaactgaaatcaccgatattcgctaaaaattcttccgttttattaaatggcattaatgttaaaggaagttgccctacatccgagcgagcttcagatgttaaacgccatacatccgctaatgcaggtgataaagatgatcgtgaattcatcgcaagtgttgtgccaattttatcgtgtaataaatcgacttcgtatgctaaatcatggaatgcacgttgatagctattttccgctcgaattaaaactgcatttttctcttggtgctctttatagccccaatagcctgttcctactacaccgactgttaataatacaatgataatacctcgtaacattgtcccacctccgctctatttacagaaaatatgtttaccgatttttttaatttgtggacgagtccaaatccatttactagtcgcagtatctggattgaaataatataaagcatttcctgttggatcccatccgttaatcgcatctaaaactgctttttttgctgtttcatttggcgttaaatatatttgtccatcggctaccgctgtaaatgctctaggttcaaagattacacctgaaacagtatttgggaatgacgcacttgtaacacgattcaaaataacggcagctactgcaacttgtcctaaatacggttcaccacgcgattctccgtatactgcgtttgccataagctgaatatcattttgagaataaccgttcggaacatttgtccctttattttgaagtggtttattctcttgtgcagtgccaccgctatttcctttattcgttgtcgtccctttattagcagttgacttgtcatacttcgttgccttcacgagcatttgcttcgttttagctccagctaaaccatcaacgggtaatccgaatttctcttgaaaattccgaagtgcccaatatgtaccccatccgaaaacaccatccacttttcccgtataaaacccgttatatttcaaacgagattgcagttcaatgacatcttcgccagatgctcctctttgaataacttgattagaaaaagcctctacattctttaattgtatactactgaccattaaagacagtcctatgaacgcaagtaaaactgctattttaaaaatagctttttggcgcataattttccctccttaattacggaaatgatttcttggttatgttttgtaaaagcctcgcttttatgtaaagaagacaaaaaaatccaaactaatatcgttgaaaaaatatgtaaacaatataaaaaaggataaaaggagttcatcatgaaaaaatggttaaaacgtgtcgcacttgtcattctgttcctaacaacatgttcaaatatatatacaggctcatcaattgttcatgcgcagccgccgtatgccaaatggggtaaacttgccgtagaaaagacgaaagaacaatacccaaaagcagaaattattgactatcttcatataggtagaaaaccaaaaacagttcaaataactgttgaaaaatttaaattgtggttacgtgagaacggaaaagaatacggtgtttttgttgatgtagaatttgaaacgaagacggagaaatttataaagttgtcgtttcagaagacgagtagataaagtgaaaccttaatcagcgggggttttgttcatctcccactaatcatcagccctcaccaatcggacttttacgggcagcccgacaaatagctggataaagtgaaacccccactgttaaaaacagacacagtggggttcttgcatttctaaaattcttttctaaagtttcgattccctaaaaatcttaccaatatacaaatagcaccaattacaactgctatccctatactgtataaaagtactttaccatatccacctattctcggatctaaaaacggatatggataccaattcacgattggaccacgtattaagctatatacaacgtaaaaaaacgggaataaaagccaacttgcagcttgtttccaagtgattttcttaataggtggatttaaaatccaatctaaaagcattataatcggcatgatataatgtagcacagtatttacccatggtattgccgtttgaagtgactcttctaaccctcttagtaacaaaaaataaacgagtcctgtcgtaagtatatataccgtcgccgcaccacgaagtatactaaactgctctgagcgaccaaatgtagctgttccgatactacttaaaaggagaatacatgcaactaaaatgttactttcgatagtaaagaaactaaaaaagttaactggattgaacggtttcacttgtgccctgattatgaattgcgtaataatggcgctacatactagaagacttaaacagaatctaaataaagataaaattttttcatgcttcatacattccctccttttcttatatataattagaatttccctgtacatgctcaataaatagttttaatggaacgagcccacgttttggcatatgactacttataatagctactacttctaactgaggaatgataacgatgtattgtccgccgtatcccatagcgaaatatatacaatacggtatgtgaaatctttcggtatgtaatacccaccagtgatatccatatgcgccgacatgttcatatgtttcaaaatgcgccctacttgactcttctaaccatttcgctgatacaatttctttttcattccaatatccattttgcaaacataattttcctaattttaataaatcggtagatttcattttcataccgaagccgccgacatatataccctgcggatcttgttgccactcgtattcgttaatttctaatggattaaataaatatttctttgcaaaccgctctgtcgacattccagtagcttcttgaataatatagctcagtaaatgagaagaacctgaattataattcatttttgtagcaggttcttcaattattggcttttctaatatgtactgtacccagttctctgattctacaaagtcatttgggaatactactccattcccaaactctttccagtcctcaccagtagtcattgttaataagtgatatagtgttaaattatgttttcccctaggtacattttcaatccactctgtgatcggtgtatgtatatcatttatatagcccttatcaactgcaataccaattaataaagatacgatactttttgtaatcgaatttattttatataagttatttgcacattcgggtgttttataatactcagttgttaattgtcctttttgataaacaagaaatgtattcacttttttcttttcgaatttattttctagttgcttgaaatccaaaaactttacctccatttaaatagttaatccatttattatatcttgttccttcattttaaacataattgtgctcaaataaaaataaacctgtcagccataatgaactgacaggtttatttttataatttcgtacgaacattccaaagctctgggaagaattgttgatcaagtactcgctttaaataagaaacaccggaggatccacctgtacccattttatgtccaataattctttctactgttttcatatgacggaaacgccattgttgtagccagtcttcaatatcaatcaatttttcagcaagctgatataaattccaatattttttcacatccgcatacacttctaaccatgctgcttctactgttgcatcttcttcataaggctgcgtaatatcacggtttaacacatctttatgaatagggaatccttcttttactaatgcttgaatcgcgacatcatatagacttggtgcatgtagcgctttatgaagtcgtgcatgtaattctggatccttttcataaatttttaatgcatgtggcgttttatagccaagtgcatactcaatcatacgatattgatacgattgaaaacctgaagcttgaccgagtgaatcacgaaactcaatatattctgatggtgttaatgtcgcaagaatatcccaagattgaataatttgagactgaatttttgatacacgtgctaacattttaaaagctggttgtaatttatcttgtttaatagattcaatcgccgcatttagctcatgtaaaatgagcttcatccaaagctcacttgcttggtgaataacgataaataacatttcatcatgatggtctgataatcttttttgagaagatagtaaactatctaattgtaaatattccccatacgtcatattctctttaaaatccgtatgaatccctttttccataattactttttcattttctttcatattagccaaacgccccttttatatgattctacttatattggtctaataacggctcgaaccggacttccatccgcatcagttaatgcaagtggtaatgcaatcaattcataatcaccgtctgctacatgatctagtacgacattttctaaaatatgaattccatgtttaaataattgatgatgcgctgctaattctttatcatctagcggatcaactgatggtacatctactccgattaaacgaatacctttctccgaaagaaaaggtgctatgtctgcacgtaaatgagggatcacatctggaaattcttcagcttttccatgtgaagatgtacgtaataataatcgttctacaccttctaaatgaaagctttctaattcctttttcccgatgctttcaagattagaaacgtcaataatccgtgctgggccaacataaacttgaacatctaaatccaatactttctttccatcattatcaaaatgaaatggtgcatcaatatgagtgcctgtatgaatactcatcgttaactttccaacatttaccgagccactttcttcttttgaccatgaaacttcatatgagaacggtgtgtctcctggccacgttgcaatatcattatttagcggttgtgaaatatcaatccactctgatgttttcatgcttatgccacaacctctcgcttattttcaaactgtttatactcttcttctttcataattttctttaatatttgtacagatttccacacttcttcatatgtgttatataaagcgaccggcgccagtcttactccattaggtgctcggaaatcagggataactccatttgcttttagcgctttacaaatacgtgctgcttctgcatgttctaaatatatgtgcccgccacgtttttcatcctctaatggatttccaattgtaaatccgaaatcttttaattcgtgatcaattaaattcagcatatatcttgtaatatgtaaagatttttcgcgtaaacgttcaataccagcatctttaaacatttcaagagaaccaattaaaggtgctgtacttaatacgtgcggtgtaccaatttgataagcacctgcatgatcggcagctgttaatgtatgctccatatcaaactgtttatcttttctagaactaaaccatccagacaatcctggcagtctattaaaatgtttactatttacataaaggcctgcaacactacccggtcctgcatttaaatatttataattgcaccaaacagcaaaatcgacatcccaatctttgaaatgatgcggaatagatcctattgaatggcataaatcaaatccaatgtgaatgccgcgtttatgagcttccgttgttaaacgtttcatatcaagaatttgaccacttctatataaaacagaaggtaataaaattaaagcgatatcatcttccagcgcatggataatatcttcttcagaaagtgttctaccatctcggcttttcactcttactaaatgctcctctggatctaatccttttaaacgaatttgactttgaagtgcataaatatctgatgggaaagtcaattcatccgcaagtatttttgtacgtattcctttcggctcataaaacgtcgcaataacttggtgtatattcgcagttgtggaaccggttacaatagtttcttccggtaaagctccaataagaggggctgtaagtttacctaatttctctgaaaggaaaaaccacggatgctcaccttctgtccagccgtcaataccatactctttccacgaatctagcaacgtaagtaatgatttctctgctctttttgaaagtagccctaatgagtttccatctaaatatatagtaccttcttttttatagaattcagtttgaaaatctttcagttcatcatgtttatcacattcaagcgcatactcataagttggttgaaatggttctttatacatggtgtcaccttctcttaattttctttttattctaactaattgaaatatatcaccttaattgatacaacgtcaatgatattatgtcagttgactttatatatgaacttcttttacaatacaattatattttcagatatttcagtataaagaggtgattctttgaaaaacagtaccctttcatcaagaaaacaccgctccttagaaacgaagaagaaactattacactctggttacactatttttatacgtaacggatttcaaaaaacgacaattacacaaattattaaacatgcagaaaccggatatggtacagcatatgtatacttcaaaaacaaagatgatctcctaattagtttaatggaagatgttatgaatcgtttttataatatcgctgaacgctctttttctccacaaacaaaagaggaagtacgtataatgatccaaaatcaagttagagcattcctgcaattagcagatgaagaacgcgctattttgcgagttgtagaggaagcgataggattatcaagagaaatacggcaaaaatgggatgagattcgggaacgttttataacaagcattaaacaggatattacttactctcaagaaagtggattagcacaacctaatttaaataaagagattgtagcacgcggttggttcgcgatgaatgaatcgtttctttggactattatgcaaaatgacaaaaagattaacttagaggaaattgtgtatacgttaacggagatgtatacgaccgggttatataaatagcacaccttcaataaataaggtgtgctattttacatctataaaaatatattatccgggtatggtagtgctaaaggaggcttttcagaaaatgagaaatattgtagttttaaagattcaccatctatcgatttcagttttccactagtaatttcacactcaaacacaacaacaatatattctaccttatcgccatttgcatatgtataacgaaactctttccctccaaatacccctttttgttttttcacttgtactttcaatcctgtttcttcccatacttcccgaattactgcttcttctggagtttccccaggttcaattgctccagccggcaaactccaatattctccgccaggatattgaaataagagttctccctgctcgtttttaataactgcagctacacttggcatgaatattagttcatgtcctaattgctcccggatttttttataatatagcgacatcgacatataattctctcccactccattaatgaataactgtattttctgacatatattctataataataccaataacaatttctatatagaaaggataagaaaatgacccaagtacaactagtaaatagcttcctatcatttttaggaacgacaaaacagcctactagcttaaagtttttaaatgagcttattaaagctcatcaagaaaaagtaaaagaaccaatacacttatcaaatatgaaagaacttatttcaaggtctaacgattggcatacatctcctgtattaaagaaaattcagattttcggttatatcgatggtattccaacttctattaatgataatgttttaaaacgatatttccaaggtaagaaaagagaacaaatcattacatcttctgaacttaattattggataacagaaagattttgtgttgataaagaaatatatgaaagagctattgagattttcaatgaaaaatcttcaaatagaatattacaaacaagttctttaatatctttaggctgaggtaaatagctagttgaaggagcaatttcaaaattaaagcttatatatccacatccagttagccacatatagtgacatttcaactcttcatcgaacatatatttcacaatatctataaataataaatctcctgcgtattgcaacagaaactccatattcgagctacaagtataataattgtcatcgtcatcaagattttttatattatattccgccaaatcccataaaaatcttcttttaatatatttttaatttttccaacaatgcttatcccccgaattttcccaagaataactctctaatctacttaaaataatttcagtaaattcttcagcaatgtccttagaaatctcaccacgatttccaataatatcccaagcaatactaattgaagtccatctcatcaatgaattcttttcaaattttaaaaactctattatttcctcctctttcatttcacttagaattgcttttaattcactttcttctaatttacttctttgattataatcagtttgatttagtatttttacatattccttactttcttgataaaaaacaatctttacttgttctggtgataaatccgctaatagtttttcaatttcttcagcgcctatttctttacctttatttatacatttgaaataacatcccattttaacttttcattaatttcactcataagttggggtattactacttcaccatattttttaaaacattcatgagttccttcgtaattttaaaataaagtttgattaaaaatatcgttttaacccgtattctatggtaaataaaaagaatccattttgaaaaagattgatcaaaatggattcttatccagcaggtttatgttttggttttataaaaaagtttgatcattttctatcaatgaaaacaattaattgactatttttattatgaagaggtcggagcaggaaattcatcaattttgatacgaagtaaactataaggtttctgtcgtaagtcttttccataatgaaatctaggctgtcgatgtaattggttcacaatgacatacaaatattgatccggaccaattgaaaaagtatccggccacaaaattctcggatcatgtgcgatagcttccattatgccatttggcaatatcttacggatactgttgttttcataatctccagcataaacagctccctttgcatcggtgatcattccatcagacgcacctttttctccccaatactccacatgataaggtaaattcatgtccggtatcgttctgtctctcaaggcttctgttgagatcgagaacaaatgccgactggttagtggagcaaaaaataatatctttccatcgggagaaatcgcaagactatcagacgccaacctaaatggagaagttgaaccgtctttgtttcgattcattaaaatttgaccttctactttcggtaaaaaatagggatcgggtgaagttgaatttgctccatttaaccgtctaaacgcgtttccatttgataaatctacgacgataatagctcctggtcctcttgaagaagaatccgttatataggcataacctgcttttccaacacgaaaatcaaaacggacatcattcagataagttgtaggcaggacaacatcttctgtaaaggtatatacttttcttattgtattggtttctaaatcaacagcgactaattttgccccccctttaataggttcagaaaaattgggtgccgctgtatctaatatccaaagcgttccccttccatcagcaactacactttggacactgatgaaagtcattgggatattctcgggattaaccaaattggtttgtaaattaggataaggctgcaatttatcctcaaaaatttccgccaccgtaaatttaacatcgtctccccatttcggaaagcaaatgaaaatacgaccggtttctgaaacagtaacacctgtaggcatagccccataaaatgcataaactagttctaaattaccgaaatatttttcactaggtaacataggtttcataatatcctcctcaagcattcaaacgggatatctcctatatatgatttatattttttctagtgcatgtttcttaataagtttttctatacgaaaagatgattgaattgattgttttcgaaatttaataagtctgtcagaagaaaggaaacattttaatttaaaggtctccagatgaagtagaattcaattagcaggtagcgaagttcaacattcccgaatcaacgttaagctggtataaaaaatggggaaatatccccctttaaatttgtgaaaaaatgtacttaagctaaactgcccgttagtttaagtgtagcacttcacaaacaatcttttgagtattcttattattcctgtttcctcaacaatctggccctttaattgaacaatacaactgaaatttaaggggcgaaagaaaaatcttatattaatacagggttttatcaatcttttttataaattatcaaactttattttaaatcaataccacactttattccatgttccatgagtgactaacgggtgctttgaacaagaaaataaaggtgagtacatattatacatgactaatatgcgctcacctttatttttttaggatttttagcttttaggtcttgataataatttttagtggttttattaacaatttatatttagtaaaattgctttttatgaatttaatataagtccaaagaatttcctggtcaatataataacgtatatcagcacactttttctttattcagtctacttacaattccaactataaatttatattcaatcctcctcttcttagtttttttaaacccttctttcgtatcaaaaataaaacacgttttccgaaaccaaattcgtacatataaagactcaaaataaataggttttataattcctcgttcctcaaattcagttccatctttattttcagtttctgttcgaacgaaccacctatttccgaagccaatttcaatatacttcacataagtccccctttcggaaattaatttctaactgttctattatttccccggtaagcgcacattccgacagaacatgagcccacaaagaaaaagtagattgcaaaaatctactttataacttatatttttgcattcgtttataaaatgtactacggggtacatttaatagttttgcagctaacgaaacatttccatttgtcttttgtaatgcttcaatcatgctatcacgctgtattttttcgcgaaaatgtaatgtatgttctgttttattttcaacttgtaactcaagttgttgttgatttcccctcattgtttgtaacaaaaaatctacttgtttttcgcatatttcccgtccttgcgacaaaatgtaaatgcgttctaatacatttactagttcccgaatatttccgggccatgtatgttgtaaaaattgattgtatatactctttggaaatacaacattccaattcttccgttcgcaaaagtgttgtataaaatatgggatatcctcttttctttctattaacgatggaacatataacggataaacgtgcaaacgataatataaatcttgacggaatttcccttcttctactaaccgtagtaaatctttatgtgtggcagtaataatacgaatatttactggtaccaattttgaactcccaattggagttattgtgcgttcttgtaaaacacgcaataatgctacttgcatctctggtggtacttcaccaatttcatctaaaaataatgttcctccgtttgcttgttcaaatttccctttatatccttgacgtcgcgcacctgtaaacgcaccttcagcataaccgaacaattcactttccattaattctttaggcaaagaaccgcagttaacagctataaagggcccgtcttttcttggactattttcatgaatcgctctcgcgacatattcctttcctactcctgtctcaccacatacatacacactagcatcagtcggtgaaacaagcttaatttcttctagtgtgtgttgaaatgctctgcttgtcccggtaactcctgaaaaagtaatcccttttataaatgtgagagcagaatatgtattcatttgtttattttcctttaaatacatacatttcccaatcattctttcattactatatactggtatctctaatttagtttccaatccatggtgcattaactcttcaagtttcattcttgaccaattatttattcgttcacgaacgctcttactcgcagaaacgataacatcacgatgattacaaataactacttgttcatcactatcaatgacatctaaaaaacgatggattaagtgtaattcattttgatgaactcttatgctacattcacgttctatcgcatgtgcaattgaagttaccataccgagcatatatggatgcgaaaattcaatcggacacgagaaatctagaacaccaattaatttcccatcatcattatgaatgggagcagccgcacaactccagctatgagatgccacggtgtaatgttcagtaccacttatcataatagcttcttcaatttctagcgctgttccaattgcatttgtgccaacagctgattccgtccattttacaccttcaataaaattaatatgtttcgctcgctttaacgtttgtttatttccacttaacgatagaacataaccatctggatcgattaataatgccatcatttgtagttcatcaatggtttttctcatattttgtatttgaggtaatgcgatatcaaggaaaatttcactctttttcttttgttcttgaaaaatgttagaagacaaaattttctgacctttattcatgtgaggattaacattagcctgtttacatcgatgccacgattctgaaattctttgatttatgcgatttgaatcaagaacaccttcattaacaaactttttccatgtatgtaagtaaaacggtgaagctaacattgtatcatctcccttttaattgttttggagatttataaaacatacttttattataaaactgaataaaagcgttttcaatacaactagcaagacgacacaaatatgttaataatttgaatatcttaatgcacttctttattcttttttagtagcactatattttgtataatggacgcaaagaaaatacataaccaaaaccacttttgtggattaccatttataaagaaaacaatcacggctattgcaaataaaatagtggatgctaaactaaaatataattttgttttaatttctcttatccctcacccctctgctactttacagtacatactaactcttcatttttcatctctactatgtactcctgtaaaacatattctttcccgccatggttttcataccattcatgtattcctttaatatgcctctcgtcacttctaattttcgattctatttcattatactgttcataactatcatattcccatatggcaaatacttcagacgtaccattcttattatctttcatccagcgtcctattagcctagaaccatgctttaattgattaggtaagttcgtgtgattgaaatgatcattaaatacttctatgaattcatttttcactacatagtacttccttctgtaaaacatacttcttcacctctttcatgaaaagtattagtaaatcttcccatcactaccgtattataatactttccatccgatagtcttttgtcatttttcaaaatgccttctacttcaaaacctaattttttataaagatgaatagctttctcgtttgtctctaatacttgtaaagatattttatttactgcattttcgtcagcccatttaatagattgttgtaataggctcttccccattctatatccccaaaactcttttaaaatacaaacgccaaactccactttatgagataatctcttaaaatttgatccttcacatcttgaaaatccaacaattcgattgtgcacttctacaactaaaaagagattcttcgtttcttcactatctgtttttattattttttgaaaccctaggtcatctataaatccctctccagcatctctatccatattttcagtttctccatcaatctgaactctaattttcgataactgctcagcatctttttcagctgcagaacgaattgtataagttaatccatttatatgatactcttgctcttttacaatcatgtcaaactcctttcaaatcaatataatggcgctattacaacttgtttaccttgtttctcaaattcctgaacagtttctttactagcctcttcgtcagttataataaggtcaatttcttttagagactctcctcttataaaacaatctattccaagtttattatgcggagctaaacaaatatttcttctagcaatttcacttactcttttactaaaataagcaacttcaggtgttgtgcagtactaataccttgtaatgaaatgcctccacctgtagagaaataaagatcaatagaaaatctacttatcaattcagaggcaaatgtatcagtaatatttcctgaaggctttacttttccaccaattaaatatgtatcgatgttcttatattctcttagatgaccagctatttctatagaattcgtaataaccgtaaatgatacttccggtaaatatttcagcatcgcattatgaatggaagccccgccaataaaaatagaatcatcttcttgtatataagatgccgcaacttttgcaattgtgttctcatatattgagctatcactataacgtttagctggttccgcagctaagttcctcactcgcgtaagttcaattgcacctccgtgcgttctttttaataaaccatccttttccataatagacaaatctcttcttatagaatcaatagacatttcaaatctttccgcaagttcctttgcgattactcttccatctgtattaagtagttctaagattctctctcgacgttcttcagtaaacatgttatcaccaccgttattgaagattcagaaacttaaactttattttaattatatgtatgcctcttctgttttacaatattttcagttcttatttattccgttttatacagtcttctcccgctttctatcccattaatttgccaaccgaataaatgtatatctgtatattacgcaaaaatactttcatttaccttcctgttgatgtaaaattattcctatgttttactttttaatacagaaagggattactatgaaatcattaatcaaaacgacatgtacagcattattatttactggaatattaacaggatgtaatagcaatactacatcaaaacaagaaaagagcgctctcgaaaagaatgcaatgcactatggagaaatagttaaaaacgaatactatagagcgacagttgaaaatgcaaagtttgaaaaaatagacaaagagcgacgccttactactcgtgttatgattaataatgttcgggacgatggacaaactattgatctttcggaaataaaatatttcatacaagatgaaaaaactggtcagaaatatgaaggtgaagctcatccgatagatgacgagcactataaaaatgttccacacgaattctctttaactactgacgttgtgtttgaactgaaaacttcaccaaaagatttaaataatatgtatttatacatagatagcaaagcagcgccgttaacagatacatattggaagcttgataatttagtatctaaatagaaagaccagtcttacatgactggtcttttacattcatacatttaactttcattaacacttatattcattttctaataacaacttgaataacatcagctaaaccagtgtgccctttcccttcaattcgctcttgttcgccattaaagaaatgaattaccttatgttcttcacaccaagtaaggatatcaattggatcatacagcatatcaacatcttttggtccaccagtactatagtttatttgtttttttgagtaaacttcaaacataattaaaccaccaggctttatcgtttgtatcattttacctaatatcatttttttataattatcatgaaaatgtccaaataccataattgctacatcatattcattttctggcaaactatcagctaataaatctactttttttgtatgcacgtttacgttatgcttctctgccaatttttttgtcttctctaatccatcttccgaataatcaatagctgttacttcgttcccttgtcttgctagaaatacagcatttctaccttctccctccgcaaatgctattactttattgtgatttgctaaacgaaatgcttgttctttaataaatgtattaggttcttccccgtaaaaatattcatctgatttatatcgatcattccaaaatttagtcatcatcttctctccttcttcatatcattttctaactacaattaaagatatcgaagagtctttttatccttaattaatttaaaaataaaagcagattaaaaatccacttttatttttttcgcaagatctacgattttttgatttcgtaacttttcttccattttctcttctgctgcaagcattacttcattaattaaacatccaggtttgtcatgtaaacaacattcaaacaatgatgttttaccttcaattgcatgtataatatctaaaaatgaaatatcttcccaattcttactaagcgagtaaccgccctttggaccagatgatgaatgtatcatcccttccttcgtcaacttagttagtattttagacaagtacgttggtgaaacattttgcatttctgctaattggtgaacactaactaacttatttggtgtagcctttgccagaaaaagcattgtatgaagagcataatttgtagctttagaatatttcataatacagctcctattgtagacttcatgtatctacaataactttatttttttattatgtcaaacgtttgtaatactccatacaacattatttcttcacaagtaatacatctgccgcgaaaatcgtcacttctctaaatggagagtcaaataaaacacctagtttaaaaccatcttcagtaagagctatttcatgatataaccaccaagcattttcaaagttttccggcatagaacactttgttactcctataaaggttacttcaagtaagtcatttgattatttaaaagtggatgaacaaaatgttaattcatttgcaaaattaaatgatcaggataagaaaaatatccaaattactatggtattaccagagcaaaatgaaaatagggattggctagcttacggttttactagtcgtgaaacattagatgcgtatattgaaaaggataaaaaagcaattaaaaataaaattaatcctttaggtagcggtgctggtagtactgatttttatgaacataaagataaaggtggccaatatatttactggagcagcggatttaaaaacttaccatctagctggaatgacagaatttcttctgtaagtacagcgtcaccttctgcaagttattcaacgacactttgggagcacacttcaacacaaggatatggaaaaggcgttttatttaaacacgctgattggtacggtaaaactgctaatttagctgctgattggaacgatattacttcagcgattgaaattaaatagtaataagacatttaatttcttctataaaaattcaaaccactattctctctttcatttagagaatagtggtttatcatatttctatttaagcatgtacagcatgtcctactgcttgcattaacgcttcatgaatcgcctcagataaagttggatgtgctgcaatataatctctcattatatcagcggtaacttctgtatgaatcattacagttccttgtccaatcagttcagtggcatgaggaccaataatagaaatccctacaatttcttggtatttaggttccacaatgacttttactttacccatttgttcgccaataataagcgcttttccgtttgctgtaaaaggaaattctccaatttgtatgtcaccgtactgctctcttgcatctttttctgttaaaccgacactagcaatttctggagctgtataaatacagcgaggtacagcatggtagtttacttttacatcttctccactcgcgtgtaatgctgctgtcgttccttcatggaaggcaacgtgagcaagctgaattccaccgatcacatcaccagctgcgtaaatatgtgatacgttcgtttgcatatgttcgttcacagcaatccctttatttgaaaactgaacccctgctttttctaaatctaattgttgtacacgtggttttcggccgacagaaatgagaacatattccgggttagcttcttggatactaccttcatattcaaatgaagcttgcttcttataattatttaatccttttaaagcagctcctgtaaatatttctacgccatcactttctaatttctctcttaaaatatgtgcgatatcttcatcttcacctggtaataattgcggtgccatttcaacaatcgtaacttttgtcccaaggcgactataaatacttgcaaactcgcatcctattacaccaccgccaacgattaacaatgaagatggtacactctcaagagacatcgcatggctactatttaaaatccattttccatcaaacggagcgaatggtaattctgtaggttcggaaccagctgcgataataaacctctctccatccactacttcttctttatttccttgtacaactcgcacacgatgatccgtttcgaatttcgcttttccttttacaactttaattttatttttcttcattaaatattgtattccttggacgagttgcattacgatttgtgatttccttgcctgtatttgatcccaatcaattgatatacttcctgtattaagcgtaaccccataatcattcgcttttctcacaatgtcatgcacttctgcactttctaacaatgatttcgtcggcatacacccaacatttaaacacgttccgccaaggtcagcttcatcaataagagtgacctcttttccattttgagccgcggtaattgccgctacatatccagctggtccgcctccaattacaactaatttactcattctctcaccttctctttataaaagaattgttataggttcttctaaataatatttaattgtgcgtaaaaatgcagctgctggtgcaccgtctagtacacgatgatcgaatgttaaacttaaaggtaacatactaccttttttaaattttttccctttatatacaggaacatgttcaattgcgccaatacctaaaataccagtctcaggtgtatttaatacaggtgtgaaatattcaataccaaagctacctaaattactaattgtaaatgtcgttccgtgcatatcatcactacttaagctacctgctcgcgccttttgtgccatatccttaatctctttagacaactctactaaagataaattatttgcaaagcgaatagctggaacgactaatcctttttctaatgcgactgctatgcctaaatgcacatgttcaaattgatgaatggcatcatctatataagcgctgttcatttctttatgctctctaagcgctaatacaacagcacgagaaacgaaatccgtaatggttagtttgttttcgtatcgtttttgcacaactttcgctatgtctttatgtaatgcaactaaatctgtaacatctactttcatcgttaacgttaattgcgcactattttgtaagcttgcatgcatacgactcgcaattgcttttctcataccagtaacaggaacgactgtactttcttcttgttcaggtacttctggatttgctactctttcttctagcgcctttaatacatctgcctttgtaatccttccgccaggacctgtaccaactaatgccttgatatccagattttcagactttgcaattttcttcgctacaggtgaaattttaattctttgcttcgctacttctttcccatttggttcttgattttgtacttctatattagatgttttttcttctaccacatgtgtgctttcctgcatttctactttttcatttggtttaccgatgtagcaaattacagtaccaggcggcactccttcatcttcacttacagctatatcaagtaccgtaccatcagctggcgcttcaatttccgtttcaattttttctgaattaatactagcaattagttctccttttgctacattatcgcctgctttaatattccagctcgtaataataccttctttcatcgccatacctaacttcggcattacaacttctacagccatgtgtctctctcccttctcatcgttttattacacatgtaataaagattggtctccaatcatttctgatacagtttcaattactttttctggcgttggcaaatacaacttttcaagtggtggtgagaacggaacaggtgtatgtggtgctgtaattcgtttaataggtgcatctaacaaatcaaaacctttatccgctacaattgccgcaatatctgttgcgatactacatcttggattcgcttcgtcaataacgataagacgatttgttttttcaacagatgataaaatagtatcttcatcaagcggtgataaagatcgtggatcaattacttctacttcaagcccctttttcgataattgctttgcagctgcaagtgctgtatgaacttgttttccgattgcgacaattgttacatcagaaccttctcgtttaatatctgcttttcctaaagaaattgtataatacccttccggcacttcacctttcatattgtaaagtgttttatcttcaaagaagattaccgggtcgtcatcttcaattgccgctaataataagccttttgcgtcatatggagtagaaggaacgacaacttttatacctggaatgctcgtaaataaggcatacaaactttgtgaatgttgtgcagctgcgctaaaacctgcaccgtgcatcgtacgtaccgtaactggcactttcgctttaccaccaaacatatagcggaattttgcaccttggtttaatacttgatcaagacaactaccaataaaatcattaaacattaattcagctatcggacgtaacccagttgcagcagctgccatcgcagctcccatataacccgcttcagaaattggtgtatccaatatacgatttcggccaaactcttgtacaagtcctttcgtaacaccaagaacaccaccccaagcttcatcatcttgcagatgatcaacttgtgcaccgcctgcaacgtcttcacctattaaaattacattttcatcacgacgcattgagattttcatcgcttcattaattgcagttgacatacttactgttctagtcataatttttcaccctcctcttatttgtaagaaacgtatacatcttttaataattcttcatcgtctgggtatggactattttcactaaattcaatggatctttgtactgcatcatctactgctttttccatatcaacaagttcagattccgttaataaaccttcatgaattaaatgcttacggaaattcacaatcgcatctttttcatttaaatgttcttctttttcttctgatgttttatatgtttgcgcttcaccttcaaaatgaccgtaattacgatatgtcatacattcaataattgttggaccatcaccattacgcgcacgttccactgcttctgcagcagctttatatacagctagaagatcttttccatctacttgaacgcctggaatattataagcttttgcacgatccgcaatagaatcacaacttgaagcatattcaaatgtagttgcttcaccgtaaccgttattttctgcaataaaaataactggtaacttccaaatcgccgctaaattaaccccttcatggaatgttccttcattatttgctccgtcaccgaagaaacaaacacttacatcttttgttcctttatatttagctgtcaatgctgaaccgcaagcaagtgggaaacccccgcctacaatgccattagcaccaagcattcctttatctaaatccgcaatatgcatggaaccgcctttacctttacataatcctgtcgctttcccgaaaagttcagccatcataccatttaaatcacaaccttttgcgatacaatgtccatgacctctatgtgtacttgtaatactgtcactatccgttaagtgggcacatacaccaactgctaccgcttcttcacctgcgtataaatgaacgaaacctggcaaaacgccttgcgcgaacaattcatgtaccttatcttcaaacttacgaatctctaacattttttcatacatccaacgagcttgttctttcgtaatttcattccctttactttcagttgtttttaacatgtccagccctcctattttcttgatcatcttttatattgcaagtaccgtgccaaattctaatccttgatttaataagttttctcttttctttcataataaaaaagtggacaaaatgagacatctgtctcgttttgtccacttttgttcacctaatttgagaactattattttattcattatcaaagctccgctgtaattttcggatgtaaataatttggccaatatgatatgcattatgagttgttacattcgctaacacttcccaccactttgcagaaacaggaaatcctactacatcactttcaaccttttcttcatttataagattttgccattgtaacagtttttctagtagtttttcccgtaattcatcgaaagtttgattatctgaaagcataaaacttttgttattatctccaatagcgggtactgcattcacatttgattctttatacctagtttgccacgttgagttccaatacagtaaatgttgtacaatttcagctatactattactctcttcattcggtttccagaaagcttctctctcagatagatctttcactgcatctgaaaatggaatataccaactgggatcgtttgcattcgccaacaattgatccgctaatacatccttcacatggaccatttttcttccctcctgttaaaaagattcatttcatgacaatactcacttctctaaatacgctgagtttgtaagatttcctctttttaagcataaccccatacatatgcacataaagaaaccgaaagcacctaatacataagctaatgcataaccacttctcccaataacccagcccgcaattccaggtccaatcatttgcccaactgcatagaaaacagatataaaactaattgccattgagacatatttcggagatacttgctttgaagctgcaacttgaattaataatagtatacctccgaggctagaaccccaaataattgccgacacgataaaaccagttatatttccaaatataattggagccatatcacctataatagctaataaaagcgcactacataaactcttctttataccaattcgatccgaaataaatccccagacagatgctcctacgattgaaaagatgccagcaattgcataaacagtccccgaaattgatgctgagataccactatcaatcataaaactagtttgatataaatttggaattaaatatacaacaccaacaataaaatacatccatgcaatgatatatagttctttcgttttccataaaaacgatttattactcattttttgctcatcttcagtaacttctggatttttcaaaacaactgaagcgacaaatacaatgatacatgtaataactccaaacaaaaaccatgcaccacgccaactatactcaggaaatgtgcgcactacataaggaacaattattccactaaatagcatacctatacctgcaccgcttaataacagtcccattacagttcctcttttgtctggaaaccaccctaccgttattgacatgagtggtgtatatacaagagcactaccagctccagcacatagcatacaaaaagcaactatccaaaacgaagaaacaaacgctaatcccattaagcttataacgacgaaccaactgcctattaataaaactgattttgcgccaaaacggatagtaaatattccagatgttcctacagttaataaataacctaaaaaaagtatggttcctagcatacctgattgagccgtagataagtgaagtccttcctgcataaatggcagtataattccatatgccatacgggcgaaaccagttgttgttataataagaaagattcctattaatacaaatatccaaaaatgactttcattccgctctttcatttaaattcctccataaaaaattatttccaattggatgttgattgtaattataatgattatgacgaaatacaactaccaaatggtggaggagtttacggtataacggatttttaatacatacgcaaaatttcagaaggtttcattccatatttctttttaaatgactctgaaaaatgactaatattattgtatccaacagcaactgccgtttcggtcacattactagttcccgaacgcaataaaagcattgctctttccattcgctgttctcttaaatatgcaaatgtggacgtgccaaataattctttaaaaccaatttttaatttataatcatttaatcctactattttagctaattctaataatgatgggggtgactccacatgcccatcaacttaagaatttgcactacccccaagtgtcaaaaaacgttattcataaaaaatgcacctccaattgttagactgtgtctaacaattggggtgcacttcaaatgaatagaggactttttccaagtatattctattttaaagttcttacttatcttttactttaaaagatattgctgtaacttctttattaacagttccatcccgtttggacttacaataatcttcccattcgctaacgaaatattgctgtctgaaatatctcctgtaagtgcacaagctcttggagattgatattttcgtaaaataatctgatcctcttctataaacatttcaagagaatctttttctacaattcctaaactccgtcttatttccattggaataacaatacgccccatactatctgctttacgagtaattcctcttgatttcataaaatgccaccctttatatttatctaatattacggtattcattttagcaataaacaacaattaggaatagttcgtattacagtactttttttagaaataaataacaattaggaatagtttatgttaaaattctttcttgtttattcttgatttttaatatatttttccttgatcatttttatatattgttttctttcagttagttcaaatataaataatgctttttttatgtctgttaaaccaacttcattagagtgctgaactttcaataaaattgcacctttttcaaaaaacaattcacctaataagtataaagtattcatatttatggctaattttatacctatttcactatactttattgcttcttcatattgatttgcaaggtgtaaacattttgttaacgtatgaatgagtcttaatttgatttctttttctctaggaaattctatcttattaaaattaattaaactttgttttaatatatttatacttttctcatactcttcattttctgcatgtattatagcaattgaattcattatgcttatttctttttctgataaaaagttagtactacttaaggtttgttttagtgctctatttaaaatgtcaaaagcattacttgttgctccatttacataatatatagcaatcgcttcatgccataataaaaattgtttatcctctttcgattggaaattattatcatttttctctttttttactattttataaagctcattatattgtttttgttttacacaatctctcattacacattttacattttcaatatattttatttttttatttttggttagtgcgaatatataatttggatcaataccaagtctttcagataattgatacaacaatatgctagatggataaataatacctttttctatcttactaatttgactttgtgaacatattccatgacataattcagattgtgacatgttttttttctttctaagttctttaataataataccaagattgcagaattccatctttcctccctcaaatgtaacactttatgagtataagaatattttccaacttttaatgtaatgtaaaattgatatagttacaattactaattatatggatttatagtttcttttacaaacttgtatcacaatacgagaaattattaaaatatggttcactaataatcaatgtgcgttttattcacccccactgattattagtccaccccaggtaggcttttacagggagtccgacttctttgccacatctaaattttgaggtcggagtcttactacccgcaaatagccggattaaaataaatatgatttttcacctttatttcttttaatagtttcttttgatttttatataaataatttcgaaggagcgtattttatgaaaagaatgttgaccgaaagagagttagaagtggctatttatgtagcaaaaggatacacagatgcagaaatttcaaaaaaaatatatgttacccctcgaagaatttcaacgataattaatcatattaaagaaaaatggcatattaattctagagtggaattaggtattttagtttatcattatggttttatagatgcacccttattttcaaataaaaaaattcagctatgtaaaaaggttgtacaatagatagctgaatataacgagtttaaattgcaaataaaaatagaagagcagacaaacttttattatttggtttactccatcactttttaaatttcagacattaatataaaaaggttagagaattaacttctctaacctttttatatacactattaggtttcaaacagtaaagatgccctaatgctaccattgatcctgttccctattcaaccctgtataaacaaaaaaatcagatattaccactattcaaaaccagttacaattctctctttcattttctgtattacttcactgctcaatactttttgaccagcaggaagttttaatatggcagcggcacctttactaaggtatatttcttgatcattattttgatttactaccaatattccttgcccttcaaattcgaaataactaatatcttttgtttcatttgtattattttttattgctttatataatccatataaatctttacttctattttctccgcccgttcgaatcggttcagtatcattcgcaacaattagtccttctggctgctcacccttcataataaaccacagcttttcatttgttggtaatagtaaattcttaaattcagagctatttaaaatttgctgtgctggaattgtttcatagattggtaacgaaaatggagatgttgttattttttcaaaacttaaattttcagaagaacttcccttactatattgataatcttttaatgcgatcgattgtactgattcacttttattttttgatgcataactaattttactagcgaaaataataacggtcattaagcacatgcacagtatcacaagcttaagtagttttcccatttatgaacccccgcttttaatattattagtttgcatggatattataaacagtttcactccaccaaaaattattattgttatggaacgtactgaaattatgattataatgatcaccataccaagggtccatgtatgttatataatctgttccatttgtccctttataaaatccatcaagtactagaaagtgtccgatgttagctccattttgccacataatgagtgcaatcatcggctgattactattaatttgacttttgaaccaatcataagattttgctccagaacttatagctgagctaacaccatatcccgataatccatattgtatttcacgtgaagttgcaggattattatatgatccacccttaacatacctaacgtactgatcttgtgaaggagttttcccaaaataatttaaaactgaaaccgaagtgcctgcccaacaccaatttgatctttcttgtaatatgttaggtacagataatttacggtctgttggtgtacttgggggatttccattaatatacgctgacgttacatatactttttttccatctttaaaataataaaaccaacgattatctaaatttcctgtccagtaatctttaaccgcttcaccatactcccatcctttaaaagatacttttgtatttccgggaatcacatctacaatatttgcatttaaactttttgcctctctaacatttacattcaatggagctgttgttcctgaaaattcaacttcttctgctattattttctgaacaccaataaaactaaatgtgaaaaacaataaaaacatacaaacaataaaatgatttcttcccttcatttctccaccccttcatcagtactaaaaaacatcaacaattcatccttattaattgttcaagcttaatattacatactaacgaaaaatgacttctcataaagtgaaactttaatcagtagtggttttattcatcccccactgattattagttgaaccaatcgggctgcccggcaaatagtgggataaattccaatacaaaaaaggagcctataaatttttataggctcctttttatttcgtcgttattacttagctaattctttcgtacccttcattacatcaatgaagaatccccagttattcactacagaagagatactgatatgttcatctggagtgtggacgttgaaaatgtctggtccgaatgaaattgcatctaattcaggcatcttttgaacgaatgcgctacactcaatccccgcatgtacagcgaagatttcaatttctttattgtatttttcttgatgtactttttcaaataaattacgaatttgtgagtttggattgtatggccattctggatactctgactctatttcaaatgtagcaccaactaattcagcaatatatttgatttcttctgcaacatgttgttttaaactacttacagaacttcgcacttcgttacgtaatttaatttcatcttgcaacgtttcaataacgcctaaatttgttgaactttctacaagacctttaatatccatgctcatactttgaatgccatttggaattaagaataatgatgaaataagctgcttttgtgtctctttagcaaatactttttcaactttttcatccaattttgtcagtgtaacatgaacatctggatcaacagcacgcatttcttcttgtaatacacgtgtccatgattctagtttttcttctacttgtcctacatcttctgtacgaattaaaattgtagctacactttcacgcggaattgcattcgtttttaatccgccgtgaacttcacttatgtaaaactccgtatgtactgataaatcacgtaatactcgtcctaatactttgttcgcattaccgcgttgtttatcaatttccataccagaatggccgccttttagaccaccaacatatatacggtatgcatccatattcgctggcgtttcatcccaaattacttgaattgtttcaacagctttcgcaccacctgcactacttacaagtaatttatgatcttcttcagaatcaatatttataaatatctttccttcaaaatgatttggatcaatagcaaaagctccgcccattgtcgtttcttcttcagtagtgataacgacttcaagtgctggatgcggaatttcttttgaatctaataaagctaatgcatacgcaactgcaataccattatcagcacctaaagttgtttgatttgcatataacatgtccccaatgattcgtaattcaattggatctttttcaaaatcatgtactgttgcttgatttttttcgcaaaccatatccatatgaccttgaataataatagctggtacattttcataaccagctgttgcttcttttttaataatgacatttaatgcttcatcttgaatgacttctaagttacgctcttttgcaaagcccactaaataatcactaatttccttttcattacctgatcctctaggaatctttgaaatttctgcaaaatgaaaaaatacagggtgctttgttaattgttctaaagtagaatacatttttcaagctcctctcaaaatgaaaaaataatatgtaagtctcatatcattataccatgattcattattttatctttcttttaacttttattgttcattttatgtacaacactcttacaacattgtaagcgcgttgtaatctacatcgatttttctcatttaataatagtcgtatactttctaaagaaacacattaaaggagataaagaaaatgaaaaagtttttagcaattattacactatgtttattattttttagttttactattggctgtgagagagcgtcactaaatagaattggtaaagatgtatattacatgcagataaaaggcgaaggaactatcgaaaaagtagatcatagaaacttacgaaactatacgctgtccgcatatgatgaagatggcgtcaaaaaacaaattacatttagaagtacaaaaaaagaaaacaatcataaattaaatgaagacgcgtttttacgcctttatgtagatcaagatgataatagcaacaatgaaatatcatcaattgaagtaaagtcctatgaagagattcagaaaacagatttacctaaaaaagtaaaagataagtttactattaaataaaaaacaaaagaaaatgctctatgcattttcttttgttcttttcacctgtatatattttgaactactattattcatcagtttctctaaccgatttatattctccgttaatgcacctttcacaagagagaaatctgtattggattcttcttttttttctttaaaaaacgaagacttttgtacattgacttcagccatctcttctcccccttttcaaaaagatacaaccttttatttatattatatagcaaatgtagaaagagtgtacacttatgattttctttttaattcttcttctaattcttctacttgctgcaacgtatccccttttattaaagagaaatctgttgtatcttcgttatcttctttaaaaaaatcattgtcataatcttttaccactacaatcacctctacatgctagtgtaggaatgattgtccaattttattcaactttgtcggattttgtttttaatttatgtatagaagaaaaggacagaaaaagattctgtccttatttactaaaataactatgatgtattgttaaattatatacattttcaaaatcccgatcttgcaggttatttttctttccatcaataacaatgaaaacgtcacttactatttttgctggtataatcccgacattttctacttgcaccgctttctgctcattcaattgctcgatatgttctaacgggacgataatactaaattgtgagcgaataccacgaaagtttgtatttaattccttcgcagcttcaaaaacaacaattttcgcgccaatcttttccccatatgaatctaaaaatgcatttaagctctttgtatattcctcttccgtatgccattccatcgtaccgaatactgctggattaacattttgaataattgtcgtgtatatttctcctcttgctttagatgcaattaatgatcgttttatggattgaactgtcttgccaatatcgctaaatttcgcaccccatatttctgaaatattaggcgttaaaatgaacgcaatatcaacaaaaataaccattgcagtaaacattaaaagatttttccagagggttaaatcgattccttttatcatgaaatacacggtgacagatatgataaacaaaccataccaagtctttctaatacgttgcttcttctcctcgtacaactcttcatttttccaataaaagaaaacaaggactacaaagacaatcgctaaaacaaataagccaattcgaatgttagagatcattaatcacatcaccctccattcaaaaactactcacgatatcattacatgcgcaagctgctctctttatgacaaaagacgtggacaagcttctaaaattagctacatcgcatatatattagaaggtaccacgtcttttatcctgctatttgtgggcagtaagaccccactgattaaaatttcactttaccatgagtctatattgtatatgtagacaagcattcatttcaaattttcgtattaaaaagaaatatgtttcggaatttccccttcaggtacttctccatccatacttaaataataatgacgaatcggacgtaagttttcgtctaattcataaacaagcggaatgctagttggaatatttaatgaaactacaccatcacttgaaaggttgtctaaatattttactagcgagcgaattgtgttaccgtgtgatgaaataattactttattaccactttttaatgtcggcgcaatttctgaatgccaataagcaagtactctcttctccgtatcctctaaacattcagttaatggaaattcaccttttttgagtgttttatatcttggatcggtcgcttcatatcgaggatcgtcttcagtaagagccggtggtcttacatcaacacttcttctccaaatatgaacttgctcctcaccatacttttgagcagtttcatctttattcagcccttgcaatgcaccataatgtctttcatttagcttccaagatttatgtattggaacccaagtaagatccatctcatgaagtacaatccataacgtccgaattgcgcgttttaatacagatgtataagccacatcaaaagtatatccgtttttctttaatattgctcctgcttctctcgcttcacttaatccattctctgatagatcaacatctgtccatccagtaaagcgattttcaagattccataagctttgtccgtgacgaataagtacaagttttatcattataattcccctttcggaaatgtgaattttattgttccattgcgtacacgtataaagtatctagtaatgtatctttttatccattcactctatgaccaatcgatagttgccaaatgtatggataaaatttgttctttttcaaacgataaaaacagaagttttttcattatttttgatcgactggtatttcacgtttcgatatccaagcatcaaaacctgatcggctatttgccatttcattcataacttggtgccaattgtcctcacatgattcaccaaattttgaaaaaatagcacccatttgttgtctttgtacatcactcagttttttctctaaatctgtacctttttctgttaaagacaactgtttcacacgtcgatcatgcatagcttcattactctcaattaagcccttttccacaagttgacgtagcggtccgtggagcgcttgcttacttatttctaatagtgataataactcatttacacttatccctggaaaacgtgcgataaaaaataaaattcgatgatgtactcgttgaatgccatattcttttataatttcatctggcttttcagtaaatgttttatatgcaaaataaaataatgctaatgcctcattcatctgttcttctttatgttgtgtcatctactttccccctgtatgtaaattataccacaatctagtaatgaatattttaatcaacgcattagaacttgttcagtctattgaaacattcattgcataattaggagatgattcatttgaaaaaacaatatactgtaagtacatatttattggatagactacacgaattaggaattgaacatatatttggggttcctggtgattataatcttgcctttttagatgatgtggtagcacataaaaatttaaagtggattggcaattgtaatgaattaaatgctgcatatgcagcagatgggtacgctcgcataaaaggaatcgccgctcttattactactttcggtgttggagaattaagcgctattaacggtattgctggctcatatgcggaaaacgtgccagttataaaaattacaggtacgccaccaacaaaagtaatggaaaatggagcaatcgtccatcatacgttaggagatggaaagttcgatcacttttccaatatgtatcgagaaatcactatagcacaaacaaatgtaacacctgagcatgctgctgaggaaattgaccgtgttttacgtgcatgttggaatgaaaaacgccctgttcatattaatttgccgattgatgtgtataataaaccaattaataaacctacagaaccaattttatataaaccgattttaagtaataaagaaacgctggataaaatgcttctacatgccacttcaataataaataacgccaaaaaacctgtaattttagctgattttgaagtagatcgatttcatgctaaagaaagtttacatcaattcgtagaaaaaactgggtttcccatcgcgacgttcagtatgggaaaaggaatattcccagaaaaacaccctcaatttataggtgtttatactggtgatgtaagttctccgtacttgcgaaaaagaattgatgaatctgattgtattattagtattggcgtgaagttaactgatactattacaggcggcttcacacaaggttttacaaaagaacaagttatagaaatccatccctacactgtgaaaattatagataaaaaatacggtccagttgtaatgcaggatgttttacaacatttaagtgattcaattgagcatcgtaataaagatacccttgacgttaagccatttattttagaaacatcaccttttactgaagagttcaatccaaaagcacaaatggtcacacaaaaacgtttttggcagcaaatgtaccatttcttacaagaaaacgacgtcttaattgtagagcaaggaacacctttctttggtagtgctgctatccctctacctaataacactgcatatgtaggacaaccattatggggatctatcggatatacactgcccgctctacttggtacacagctcgccaatttatcacggcgcaacattttaattattggtgatggttctttccaagtaactgcccaagagttatcaactatactacgtcaaaatttaaaaccgattatatttttaatcaataacaacggatacactgttgaacgtgccattcacggacaaaaccaactttataatgacatacagatgtgggattacaataaactatcaatgatatttggatcagaagaaaaaagtctaacatttaaagtagaaaatgaagcagaattagcagaaaccttagtaaatataatttttaataagaatcaacttatctttattgaagttataatgagccaaagcgatcaacctgaattgttagctaaactcgggaaaagattcggtcagcaaaattcttaatataaaagcataacctaattatacaactagtagtgtaaaacttgttttgagaatagtttcgacactcaaaatacataaggaaaaggatggaaagtaccatccttttctattttaagagccttcttcgactaacgccccgtgcgacaagcaaaaattcttaatccatctttaattttatagcttttgtcgcaataaatgttttaatatgcttatctaatatccttgttccaccaaaatcatcctcataaaaacctgttatagcaaaaccagcatcaatttggccttggatttggtcttctaaagtatgcgcatattctattgtttgatttgaatcgatgtaatcttgaacttcatcctctggtaaataatccaatgttgatgaaggaattgaatgtttaacatccagaatacctttttgctcttggttatcatcaaaaatccatagtaacggatttgtaaatccagcaataagaacacctttattctttaaaaccctagaaacttcattccatacaagatgaacatctttgacaaacaaattagacacaggatttacaacaatatcaaaatattcttcctcaaaatcactaaggtctgacatatctccttgtacggtttttaaagttaaaccatcccgttttgctaccttttcatcttgttccaattgcttcttagatatatcagtaactgttacatctgctccagcagcagatagaactggtgcttgttgtccgccacctgatgctaagcaaagtatctttaatccatctaatgactttggaaaccattctctaggaactgatttttccgtagtgactgtaatctcccattcacctgatttgcttttctcaataatctcgctacttacagactgcgtgtatctagaaccttcttccaccttcttatcccatgcattactgttttgttgtgtagtatccattacaattattcctcctaacaatctagttgcattttaagtgtaaacttattaactatttatgctttcctttttctattaacccgcctgatagttcatacatagttgtctatatttatattaacagataaatgctaataatcgctaaaaattctaaaaagacaaaaaattatacatctattccattcatttaaaataatcgtagaattggtaagttttaaacaactcacttccacataaaaatagcattccaaatctgttgacagttggaacgcttttttatgttatttcatttttcaagcttttaactaaatccattaaacaaataagctacgctttttctttttttattcagcaagagttaactgccaagatacaccatacttatcatttaaccagccaaactttttactaaacggataagaacctaaaggcataagaatcgctccatcctgcgctagtttatgaaagaccgtttcaatttcttcttctgtctcacaagttacataaagagacatagctggagtgaatgtaaaattatgatttacataactatcaatacacataaactcttggccatttagcgtaaaagttgcatgaattacagttccctctttaccaggtccattttcatcgtagcgagaaatacttacaatttctgattgatcaaatagtgacgtataaaaattcattgcttcctcagctttgccctcaaacattaaaaatgtagtaattttttgatttgcgttactcatatggagacagccccttgttatgtatttatgtaaaacatacgccaacaaaaccaaacgtacgttccttttaatatattgtctataaaaacgatgagtttgtcaattatctactttattatttcttcttaaataatgctgtccaaagaaatgattctccaaacatttctttcggttgtttcatttgtttcattcttctaatcacaattacctcaaattctttaaatatctctcttaacttttcttccgagtatgcaagaccaccttgtagactccaccctctatatacgtcccaatctgttatttccgatccatttcgctcatctaaatcacctgccgcaaaacatgttaatccgaaataaccacccgattttaatgagtttttaattaaatccacataatttattcttctatgcggtggaatgtgatgcaaacagcccgaatcgtatacaaaatcaaattcgttttgaacctctaaattaaaaattgaatcacaaataaaatgaattgctacctcttttgccaatgccctttctttagcccaattaatgccttctacagataaatccactgctgttacatcaaatccttgagtcgctaaataaatggcatttctacctggaccacatccaagttctaatactttcccttttgaaactctctctttttgtatatacgaaactaggttctcatctggaacattttcaaaaaatggaacatccttttctctattctcataaaattcattccaaaatggttctgcaggtcttaataatgaatcaagcatttttaaaatgtcttcttgtgtgtgtaacgtttcatttttcattaatacccctccacaaattaatagtcagaaaattattatatatctttttgaactttcaaacaaagaaaaaactcctacattcaataggagtttttccctttaaaatccaagtatagctaaccattttaacaacttctcttctcatactttcaaatgatcatgttcctatttacccatccgtatttcactaacaatttctccgtctgccaaaaaaagaactctttctgttttcaccgctacctttacaacatgagtcacttaagaagaatactttgctgaaaaataaagccgatttcgttaaggcatatttttgctaacgcctcttctttcatacatgatatttcatacaatcatacttttctaataaaataacgtttttgttcacttttttgatacatttacgaaacattcatgtgttatcttcattaagttcttttctttttataatgtcgtgtgagatataccaacagaggaagccctagatcccctaatcctagggcttttttataagaattttatacattttattatttccactaactctttaaattgtatatacataatataaaattttcatgttgttatattttttgatggcctcttatctttccttaaaaggcttttgtttcaaataacgcttttgtttaatttatatttaaaaagttccttttcataaagacttcccttatatgctatactcattcttaaataattgtataaggaatgttaaaaatggatgatagatcgtcaagacaatggaaattgcgacaaaagttaagagcactgaaaaccaaaaacaacaatgacacaaaccctttgtttagtgaatgccttgaatccctaggaaacgaaactctcattttctcccaagaaaaaagccagcagattgctactattttaatgaattcatttcctataactgtctcgggaagaatagattgggaacagatagataatcaattcatagcttcgaacaaagaacaactaatttcccttattagagcaaaccaactagattttgacgaacagatttttataatatgggataactatgaaatccctgtagtaagtacaaatcttgataaagtattccaatcactagttgacgttgatgcagtcagtttttattactggctattagacaaagaatatagattcgtaattgaaataaatgatgaagaattgattaggattgggtttcgctaatactctaagcatatgaagctagttcccttcatttcttaatattttcttcgtcaccaccgctattattatcattatgaaactaatagcaaatataggtaaataaattttcgtactgaatccttcaaacataaaaccatatacgacttgcccaattggtgccatacattgagataccgctgttataaatgccatcacttttcctagattttcatttggtgttttcttttggactacagtaatcacataaatggatacaattgtcataatcattgcgattagaagagaagaaagtataaagaggataaatggtggatagtatcctaaattaagaataaacggtgtaactgatagtgccactggcattactaataaagctatgataagcatccaattatataatgttttcatctgtaactttttagcaaagaaaccgattgacaatgcccctaatatggttgcaaaatcaattaatcccattccaattccatacatcgtatcgctactctgcatagttactcgtaacataataggtcctccaacaacaaataacggtgtcaaaattaagtttagtaaagttgcaagtaacatagccttcaaaataaaaggttgctttaaaacataaagaaaaccttttttcatatcttttacaattgtcggtatgatatggctttcttgcgctctttttataaaaggtattgtaataaacatttctaaaattgcagataaaaagaaagcaagacaacttgttattacgagcattttcaaaccaattatgccatataatattcctcctagtacaggtgcaactatattagataatgcttgcacaccatttatgataccgtttgcttgttctaactttttctctggaactaattgcggaatacttgccataacaactggtgagtacattgcactaatgactgctagtaaaaacataattgctccaatcaataaaatagataccgattcagttaataacaaaactataaaacttaatacaatagcagcgtttataaaatccaaaatgaccattacattacggcggttgaaacgatctgctatcgctccgccaagaggagctaacaaaaacgggatactcgttatggcatataaccctgcaaatatatcggcacgtcctgttatatctagcacatataaagacagtgcaaaacgtaatagtgttgaacctaaaatagtaataatttgaccacttaccattaagtgaaaatctttcaaggaagattgaatacttgctggcatcttcatcacatccttcatttagtctagaccgactgccggtctataacacccaaacagaaaaaagctatttctgtttcattaaaacctcgatcatataatcaaaggacccttctttcgctccaacagatacttccatcattttaatataagccttagctcttctcatcatttcttccggtttccactggaataaaccatcatcaaatatgacttgtgctgaagagagtaataattcaattgtttcttgtgggtatggagtagaaaatatgccttcttctattccttgctctaaaacttccgttaatacaggagataaatgtataatggattgcactaaacttttctgatgcatttctgcattatttggttgatggaattgttcaatcattttttctttgacatctcctgattttggtgattgttccattaaaattttaaataacttatctaaaacggggatatcgggattggagacaatccttttcgccttagtgacatcctctttaataatcctcataatgatttcatccattacttcctccttcgacttaaaataatgataaaacgtcccctttgctataccaatttcttttaaaatatcattcacggttgttttcgtataacctttcgtaagaaacaaacgctcagctgtttctaaaatttcctttctacgctcctcatactcctttacaattcgcattcaagttctccttcccatcagaccgactgtcggtctattaaaattatatgtttagtttgcaaaaagtttcctattatcgtacatatacaacaccatactttctatttcctttataaatttttattttttaacgtccgctcaatttgtttaaaacgtatctcatgtttcttatcgtcacctttcattttaggaaaagaacgatgcctccgttcgatctatgtacttatcaatggagtattttgttgagttccaatatgtaatattgcatatttcgtacttttaatttttgtatatgtaataatttatttataaaaatataaattattaataagggtgatttatatgagcaagttccgaaagaagattattaaatatttgcaaacattttggggatgcttagcatttggagtattaatgtttgctatcttcttaattacggatttaacagatgcatctttaaatacattaggctggagagactggctaggttctgtagcaggcgcaaccattttatctgttgggatgtttactttaaataaattgaatttaaaataaatattcggtcaatactgaatttgggctgtatgccaacattcatttaaagtagtcttctctgtatctccttgtattgagcagttagcttttgctagccgctcttttattttgttccggttcttgcctcttaaagaactctttatctactttcccccaataagtacacatatctattctccattgctacaaaatgaaatctttattttgttttacgcgtcgcttcttcaatcagccaagatacaatattaaaatcattagtttcaccctttaaagatgttccgttccaaaagcattctttcatcacttcaagtaatttttcaacagcttcaattcatctcatattaattttccctttctcccaaataactattttgttttattaattaactgattaataaaacaaacacctttattaaacattccatgtttcttcaccccttgaatatttttcaaataaaaatacatactattttcaagccgccgtgtccatggctaatacctctttcttttgatgtatatttttttagaaatcgaaaataataccaacaagctgtttgaactagcagcttcactcttctcgcaatggggatgcaaattatcacaattagctaactcattgaactcactggcagacaaccaaaatcgttgtctgctttttgtatgagatttttcgttttacatatactacttttgaacctgcagaccaatacgagccattttggtgcttgggatttcccttccggggataagtatcttttacttatcccttttttgtatagacacgtatatttagggtaaaactaattacaagcagattttctgtttatgcgtagttctaaacaagattactttttctcctattaaaggacggcaggtacgactgctagtccttttttcttatttcgcatattatcactaaattaccttcatcgtcgtcgtaagcaatttccccataaggatggcagtggtgcttctcgagttcctcatcgatcaaaactaacaaattagttttccagtttccaacgatcgtacaccaatacgagtttaatccttcataaacttctcttgttctatttcaataattgcggaatgtataatgaaaatactcgctcgcttcaataccttttcttttaaccaaagtgttctgctgaatgatagtaatacccttgcactaatggttttggactataaaattccctttataaatttcaaatgcggtgaatgaaattttgtttttttcttgccatcatccttgttgtatacaaacaaaaaaagagccacaatattttgcgactcttttacaattataaccatttaacggccacgtctttgctgaccttgctttgtactaccttttttattacttggcttattaaatgatcggttattttcatttctagaactatttctcgaactatttcttgaatcacttcttgagctatttcttgaatcacgtcttgattcacttcttgaaccttcgcggctatctctttgacgattttgacctgatttcttcggagccagctttggtaccggttttccattttcatctacacgttttatcttcggttgttcgattatttctctttgtattggtgcaccaagcgttttttcaatttcttctaaatgtttttcatctttcgctgcaacgaacgtaattgcaagacctgatccacctgcacgtcctgttcggccaatacggtgaatataactttctacatcttcagggatgtcaaagttaaatacgtgcgttacaccatctacatcaagtccacgagctgctacatccgttgcgattaagtactgaattttagcttcgcggaaactcttcataactctttcacgtttcgcttgaggtatatcaccatgaagttcagcacaattataacctagtccttttaaattatcatacagtttacttactctaagttttgtacggcagaaaataacagctaaaaatggctgatcacgatccataacaaaacgaagtgcatctggctttgcacggtctgtcgtctcaatgacacgctgctcaattgtatcaaccgttacttcttcactttgtacttgaatcatttgcggttcatccatataacgcttcgccaattttttaatatcttttggcatcgttgctgagaataacatcgtttgtttactacctggtgtctcatctaaaatatcttcaatatcatataagaaaccaaaataaagcatttgatccgcttcatctagtacaatcgttgaaagattacttaaatcaattgtttcacggcgtatatgatctaataatcgtcctggtgttgcaacaacaatatgtgtattaccttttaattttctcaattgttgtgctacatcttgcccaccataaatcgctagtacattaatatcttctctttgaacaagcatttttttaatttcagttgtaatttgcagggctagttcccttgttggtgcaacaattaaagcctgaacatcactagactctgaatcgattttttctaaaatcggtaacacgaatgctaacgttttacccgtacctgtttttgcctgcccaataatatctttaccagacataataacaggaattgcctgctcttgaattggtgttgcttctgtaattccattttcacgtaatgtatgattaaaagtttcactaattcctaattctaaaaaatttttcaaatagaccacttcttttccttatttttcacattagctttcattgtaccatttgtttcgccaaatatgaaaaataaaaaaattcttatcttctttttttatattcatcctgtactagatgaacaaattctttttgctttttctcagattttattaatgcttccatatttatagaagtcaaaatataccttttaatttttctattactccaaattaaacttgtatacttcagatcttcatgtagatttcgaaaccactctaattcacttaattttgcgatatgatgtttcaatttcatgtcatttcgaggataaaataaaatgatatctgctattacatcaaataacgaacccatcttctcccccctatactcttgctcaaattatatatattcttctttacatatatatttcaattttaccgaaatataatgttactgatttggttgaaatcgcaaaatatatgaactaaaaaccaatcttttcgatttaggaaagaccgattttcattaatttatacagtaagctttcctccatgatagcaataatactgtgttgctttaaaacttttaatcctatttaaagactgtttcgctttttctatatctaaacaaaaattcggattagctattactaacccacgattctcttgaacagccgcatctcccgtaattacacaatctaaattcggaaaatataatgaaatatgccccgaagtatgtcctggcgtcgctactatttgacattcattattcaaaatcatttgaccatcatgcactttttcatcgacggaaatatgttttatattttttaactgttgtataaaccatttaccaaattctttttcttcatttggcatacgttctaacatttcttcagcttgaactaacctctctgattttatatcaccactaatatagttagattcaatttcactagcaataacattaatttgaggatatttcactttaaaatcgtataaaggccctatatgatcatcatcataatgagtaataattatattctttaagttttttatctcatatccatgttttaatattgcattttcaattaaaggtaaaaaacttggatatcctgtatcgactaacgttaattcattatgtaatataattaaacttggataaatacattgtttttgcccgttaaattcgaattcaattggtagttctattattttcatttttcttcccccataccgcctattcaatatttaataataaccacttcgtccacatacattttactatacatattaaaaaattttttatcagtattttgttttaagttttttattagttaattctatttttaaatgtggataccaaagttattttatatctatttctcatatgtgttagcaagttcgtctgtaaaatcatagacagggttttcactcttaacctaagctgttactttttataaatgaattttacccttattggacaagtatccgtttcgtaattttcatatgtaataaaagagacatctccttaaattagaaatgtctcttttaaattaatagaacaaattcagttgtatttcttttttgtgaaaagttttttcatcaataaattatacattttcagtgcttgtactacaacttgtcgagtataaaattggtataccacatatagcatcattcattacatcacgaaaaacttttgcagcgacttctgtgaaagtttggcatagattagaaatatcatcattaaaaaactgaatcacttttgcagcaaaaaccggaaaaacaacattcgctccacctgggaactgcggctgcacaacaacttgctcaaaatacaagttgctttctaaagctacttgaaaaaggtgtgcaatttcaaaagcatctaaaggacaaggaattgggtttacaattccatccccaataacactaacaacaatagttacatttacattgccaaattgcactgtaggtttaagaagtgtagctaatgcaatcgctttttcaaaatccgtagtttgtactaaaataataaaatttccatcagtcggtattagcggacctactgttacagttggatcagcccctaccgaatttctgagttcgttaaaatatgtgatccatggcggtgaaagttgaggttgtacacgctcgtccattctttttccacctccttatacaattctcaatactataatatgaaaaaattctaatagcgcattagatatatttattatttttcatagcattttcgtatcaatctgagaattttgtttgtttagaaaaccttttagaaacatttaaccatttattgtatgtcaataatatagtagtgaaaaatttacaggtgaaggatatagaaagaacaaggttgctagttcattaattgtaaaaatatgacgttttagatgaataagctttatttgcagtaatatacctttattattatgtaccttatattgcagcgattcactaataagacgtacaatccctatccttttagaagtaattaaaaccttcggtgaaatcttctttagatagataccatttgcaaattgtttaatttaacaaatactacttgcatactatgtaatgaaacactgtgaatcattgtataatccacattatattattttgaacaggtaatcccctatttttatggaaatatataattaagaaaaacaataaaattgattaatctctcacttctttgtccatccttttaaaaaatctatgtttttgtaaaaggagtgtttatatggagaaacagacactttggaaaaagttcaaaaaaagctctgtaaacctcggtaaatctagcgtatatgaaagtattattttattctacacaatgaaaaagaaagaattacctactaaggcgaaattcataatattagccgctttatcttattacgtattaacaatcgatttcattccagatatagctgctattattgggattggcttattagatgatgttttagcaatcgctgtagcgcataaatacgttatgagacacgcagatgctgaaattcgagaaaagagcaaagtaaagatggagtcattatttacttcagcacaagcataatgaaattatctagtcatttacctacctttttactttcaaataaagctaactgtaattaatgatagttccacctcactgaatattacccttcaccatgagagcatagcagaataaatccctaaacaaaagcatttctcttagctctcaaaccgtaaacaaatcgggaatcagcacttgttcctaagttctgactcccttttatttgttcttatatctatctgttatacagttgcatgcattcccttatacaaaactgccattgccgctactataagaatcatacccataaaagcaggtacggcatgaccaagtgatacatagatttgtcctccaataatcggaccaatcattcttgctaaagcttgaatagattggcttccaccttgaatccttccttgttcattagaactgacagactttgaaagcatcccgttgaatgaaggcccgaaaattgaatccccaaaaccaaacattagcattccaacgataagtagtggagagagtgaaaatacagctgatgctgcaataaaactgtatcctataatctccaaaaccatcccaagaattgctatttgtttatcactaagcttaattaaaagctttggcattataaaactttgtgaaacaatgtcttgaaagcccaaaattgaaaacataagtccgattaatgcaggtttccaactgaaagtatccattgtaaattgcgtgaaaattgcttgtaaagatccgttaggtatccaaagtaaaaacgctgagataagtaaccattttaaattttttatggaaagtatatttgctagctgtgcaaaaggatttaaccttacaaaagtaatctcttttaacctgttatttttgtcaaggctctcaggcatgtatttcataccatataaaacatttaataaagttatgaacgctccaaagtataaaggtacagaatgaccaaactttgcaagtaagcccccaagagttggtccaataatagttcccgcacctacaactgcactcacccatccaaagtatttcgttctctgctctttcggaatgatatctgcaaaatatgcgaagatagtacttatgctcccacctgttataccttctattatccgtccagcaaataatacccataaagctcctcctatgccaaaaactaagtacccaattgcagaaccaaataagcatattaaaagtaatggacgacggccatacttatcgcttaaagccccgagtgctggagcagctaaaaacacgcaggccgcatatacggaagttagtagtgtaacaaccaatgcttgttcttccggattgcttgtatatggctgtactaagaatgggactacaggcataatgatactgaaacctataccacaaagaaatacagaaataagtccgaatagtaaagcatgtttatctatgcttttttcagtttccctttcattttgtgatctaaatatagacatttaacttctctccttaaaatgttttgttgctttgtcaacaaaatgataactctgttttgttgattagtcaacaaagataaaataataaaaaagcagcctattctcatattagagtaaggctgccattttattattaaaatgtattacgatttaatatgtataccttgtttctttatttctgcatccaaatgtctactatacttttccacaaagctaattatactgtcgaattcttcttcagttacttgctcaaatacagctttatcccgctcttgaaactctttgtgcagatcttcatggattttataaatttctttcccttgttcggtaagcttaaaataaatttctttcttattttctgacttttggtaactttcaacaaggcctttttgtatgagcttcttagtcattctacttatagcaccgcgagtcacataaaaagcctctgcgagttgcgtcacgttagaatctgcattgttttcaatatattcaatacagtggacttcagaagacttaaaacctttaagaccttcttccatcttatctttattaagccaaaccagtttattatataattccctgaaaccgttcatgacctgttcttctttattcatgatctgccctcctcaccgctcattagcacattaaaactattatattaaatttctgcttacatttcgacaatattgaaataattattgtaacattaaagatatgtgtaaaaataggcgcttaaataaaataatttttaaacagcaaattttgcaagtttattgctacttacagtaaacagtagacaaaaagtaagagctaagactatttctcttagctcttctttcataaaactatttcacttcattagcgacaaaaaagtgctcacatacacttgatatgcgctgtaagtctacgttcccaccagatataaccgctactactttttttccttttatatagctatcaacttttcctgcaagaagtgcagcagttgctaatgcacctgcaccttctacaacagctttcccacgttgtaataaatctttcatcgctacttccagctctttttctgatacagttacaatatcatctactaattcttttacaatttcaaatgttaattcacctggtattttaactgcgcaaccatctgcaatagtaggcgcctcataatgttctacgattgctcctttatcgtaagatgccttcattccatgaacattatctgcttggacaccaattatattaatggatggattaaaagatttcaatgctacagcaatgccagaaataattccgcctccaccaattggtacaatgacagtatctacatcccacatatcatcaagaatgtctaatcctattgtaccttgaccagccattacctctacatcatcatatggatgtaagtatgtttcacctgtttcccttataatttcttcacattttacctttgcatcatcaaaggtttcaccatgtaaaatcacttcagatccatatccttttgttgcttcaactttcgcctgcggtgcagaaattggcataacaattttactcttaataccgagtaaatgagcagataatgcaactccttgtgcatgattacctgctgaacatgcaattacacctctttctttttcttgatccgtgagccgcgacattttattaaatgcgccacggaatttaaaagaacccgttaattgcatattttctaatttcaaatgaatttctccgcccgttttactagtcaaataaaaagattttactaatggcgttttacgagcatttctatctagaattttgtgagcttttttaatatcgtctatatgtaatggtagttttctagttatcatactgacacctcttccaaagttctatttctaagttttcgtaagtcgtagctcctttatacgaaaagagaaaatctttatatatgtaccccactctgaaataaacatatttgcaaacaatttaacatcctcttcatatcgcgttctttataatgatttaaacatgcaatttgaatccaattattcttttgtaaataagatgactcataatgaacaacgtatccttgtaatgctaatgcatcgcctactactttagaagaatgctcttcgctcaatacaatagtaagtataattggtgcggcgtgttctttagttgaaacaagctttaaacccatatcagtaataacttcttcaacataatcgtatgtctctttaatttttacaaatgccttttcatcttcaaatctcttcaacgcttcttgcaatgcataaattaaattccatgattgtgagtatggaatgctttcattttcttcatacatgccaatgtccatataggccggcacagcctcgtttatttttacaatgtggttatgaaaaacgaaagaaattcctgtatatgatttaatcgctttaccgctaacaccacttgcaaaatacacatccttcaagtctaatggtattgctccaattgaacttatacaatctacacatagtttcatttgattctcgttacaaagagtatttagctcgtctaaatcgtttaacattccagtagatgtttcatgatgaacaaaccaaagccattcataatttccagttattattatttcttctaattcgttataaataaacggctctcccatttcttttttatacgtatcaaaatgtaattgtgctcgttttgcatgtccaactaatctatttccaaattctccatttgttaatattagtcctttcccttttaaagaacgtaactgtaaagcaatcgcatcatttgctaacgtccctgttcctaacataagctgtacatgttttgcttttgtcatgtgaagtaaccgttttttcacattgtccattgtcacttgaaatgacttagagcgatgcgaaataggccgcgtagaaaatgcctttcgaacattctcttcaatatctactggaccaggtaaaaacgtatattctttcgtcataatccctccaacactcgactcttcaaacatagcaggagtaacatacattggctggaaggctgcttcttctgtaccaactaacgtatgaaaagatttgaatcccatttgctcatataaaggtagttcacgtgttgttgcagaaatgagtgctaattcatatccatttagaagcaaataacgatgtagaaaacgaattaatcctaacaacgctcttccatttctatattcacgttctactgaaagtaaacgaatttcatacactttttctccatgctcttgcaaataaatatctaaatttgagattttataatctaacgagaatggtcgttttccccgcactgcgaccatacctactaatctatcctcatctaaacaaattaaatatgtattttcatcatgaaagcgatctatacgaacacgctctttcgtttcttcatgttgcggaatttcttctacaaatgttttataattcaatttatgtatacgttcaaattcccgatcttgatcagcaactttataaattaaccccatggcttatctcctttatgtatttaataaaaattataagtggagatttactccacttattaaaatttcgtttcagtctcgatttacatataaaataagcacaatgataaaagcacttaaaatagtcgtaataatagaataagaatacaaaatcatgcaaactggtaaacaagcaattgtaattaaccctggcttagtaaaccctttaaaaattaaataaaatataatgaaaacagcaacaagagtaagcgctatcaaataatcaaatgcgattaatcctccaataaatgttgatatgccttttccgcccttgcctttaaatacaattggataaatatgtcccagtaaaacagctagtaaagctaacattacaaatgtagaatgtccaaaaaggtattttgcaatagaaactacgattgcccctttaattgcatcacctaaaaatgtagcgatgaaatatccttttccatatacacgccccatatttcttgcgccgggattcccacttccttcatctcggatatcaacgttatatctccatttcgttactatataagcggtcaatatgttcccaaataaataagaagcgaccaaatacaaaaactgcatactattaatcatataatcattcactttctacatggaagtacttatacaatattcatgaactatgtatattgtacttttttatccacttccctttatacattttaacatcatatatttacaaatcatacaaaaattctcatacgctatttttaaaaatatatatccctcattaaataatatgttcctttcactgccatttctgcttgtgatacgaatgtaatttctttcatactttcttcacagcatttcttaaatacagcaaatatttcaggaactaaacgcaatatactgccacttactgcaattggcgttgagtgcttaaagttcaacttgttataaacatttactgtaatccttgccaattcttttccagcttgcaagataatttcacgtgcatcatcattcccatttctcgcttcctgaataactaatggcgcgattgctgcaactttatcttttgaagaactataaactagtctttttatatgagacgacgtcaaaagttgaaactcatcttgaatccttaagcttaatggacaaagtgcaactccttgatcaaattgattggccattctttttaaaccttgtaatgcaatccaatatccgcttccttcatctcctaaaatatgtccccatccaccactatactcgtacacttctcctttctttccaagacaaattgcacctgtgccgccaattgttaaaattccatcttttccttttaaaacagctgcatgtgcaatcatcgcatcattaaaaacttcaattggtgttccatacttcttctttagacgtaatgttaattcattcgtatttactccacttacacccgctaatcctaaacaaatacaaacgcaatgcccatttaatacacctttctggcattgatcaatcacctccataatatgcacaagaacttcttcaaaatctattaatatatttccaaaaccacttgtagctcttacaagttcatttccgtctttatcaaatgcaattgcttctgtctttgttcccccgccgtctactccaatcatatatttcatctattcgcctcattcatttcaaattggagggaatgttatattcccaaaaactacagattcctttgcacctgttgcgctcggcacattactcggattacgatgatatgtttcatttgctaaaatggcaaaggcgattgcttccttcgcttctgaagaatagcctatatcttcttgaaggaataatgcacatttttcttctttcaatccatgccgtatcatttctacaagtgtatcattataacttccgccaccacctagaattacctcatcgatttcataatacggcagaataaactccttataatgataaacaattgaacttgctgtaaaccttgtgacagtcgtcaatatattttctttactatgcttttcaaaccgctttaataactcactgacaaattcttctccaaactgttctctaccagttgatttcggtggattcattttcagaaatggatgattcatacaatatgtcaaaacctcttctacaattacccctgcaacatacataacatgcatgacctcctatttactaaaaaacaatcatgtaagtaaccaacgtacaaccaatcgaaaacaatataaatctaaaaaacaactgagctttcgatgcaaacgatccatcaatgaaagaaacaactaccgtaagcaaaacgcttgccgcaatacttgtaacgagccaaatactatgcatttgtgataaatttagcatgcctaataaagggacaaaaagtaaatttgcacaaatcactccaaatagtaataaaaacacacctttataactaaattttatattcattctatttccccctttctagttttaatgtgaaagaagtgatagacaaaaagtctatcactcaaaataacagcatgcagattaaggattaaccgactctccgtcaccattcttttcgatttcaagcatatttttgtcgtacattttaaagaatggtaaataaataagaaacgatattgctatatttataaaaactaatacaatcgcacgccaatctccacctgttgctaaatatgcaccaattggagcaggtaatgtccatggcggcataatatgcgttggtgttacaaatcccattgcggttgcagcatacgctatagtagctgttactaacggggtaatgacgaaaggaataattaaaattggatttaatacaatcggcaaaccgaatataaccggttcatttatattaaaaatccccggaacaatacacgttctcgataatgctttcgaatattttgatcgaccaaatacaatcatagctaacacaagccctaacgttgcgcccgaaccaccaatccaaataaaccattgataaaacggttctggtgcaataaacggaaaatgactcgctccacttgctacagcttcaccgttctttcctaaatacacatcccaaagtggccttgccacagtacctacaactgatactccgtgtatcccgaaagaccagaaaaacgtaattaaaaatacaggtataataacgccaaagtaactatcaccagcttttactaacggtgcggctagtttatctacaacgtaatgtaaatcaactttaaaaacgactgtaataagactcatcataataataacgaatgctgcaggtataagtgcttcaaatgaacgtgatactgacggtggtacttgttctggcatttttatcgttacgttattcttcttacaaaaccttaaaatctcaactgataaaatagagacgatcatcgtcacaaataatccatgacctccaagatttgtcatcggaagcatgaatccttttttatcaattaactcaggcgttaatgttaaaagtagtgaacataccgcaagctgtgctcctgataaagcatctaatttataacttttcgctaaattatatcctattccaaatgctatatataaggacataataaacatagttaaacgatatggtatcaatatacttgtttgattctttaatgcccaaaccgatatgaaactatctttcggcagtggtggaaatgctactattaaaaaaaagcttcctactataataaatggtaacgccgaaataactccatcacggattgcttgtagatgcctctgctcagaaagccttgccatcgggccagataagtttttatcaagaaacgtgacaaacttattcataacgcttcctcctaactaattaattcatttacagtttttaataaagtcgggcctccaagtggcgtgtatgcttgcggtggaatgatgccacacggaatagattcctcctctgcaaatttttttacagagtcaaatcggtgtcttatttgaggtgccaccattacgacatcccagccattctttacttcttcctctacctcattcgttccaattgcatgcacttccatgttcacaccatttttctccgcttctttttttaaagcgtttacaacaattgcactggacattcctccagaacagacgaacaaaactttcatttattaatcctcctatacttataatttattacccttcaaatgaaaggaagtttcactttactaacaagcatatgaagtagtaaatgaatttagttataatgaaagtaaatttcattaaaaatatttttcctattaaattaatgtttcaatatgcaattttctctattgcaaagtcaacctcgcctcctatattattttaaataatcatatgatagggaggcgtataaatgatcgttaaacgtttattaatgatatgttgtatcgtcatcttgttcatccctttctctttcattccccctcactctacttatgctgaagtaaatactgcatacaaaaaacatgaattacgtgctgtatggattgcatctgttctgaatattgattggccctcaaaaactggcttacccattgaaaaacagaaacaagaatttataagattattagacgatgtaaaaagcactggtatgaatgcagttgttgtacaaattaaaccaaccgctgatgctttctatccttcaaattacggtccttggtctgaatacattacaggaacacaaggaaaagatcctggttatgacccgcttgcatttatgattgaagaaactcataaaagaaatatagaattccacgcttggattaacccataccgaataacgatgaatcacaccgatataaatcgattatcaaataatcaccctgcaaggcaacatcccaattgggttgtcccttatggcggaaagttatattacaatcccggtattccagaagtgaaaaaatttataacagaaggtgctttagaaatcgtgcaaaattacgatattgatgcgctgcatatggatgattatttttatccatataaagtagccggtgaagaatttccagatcagaaaacgtacgaaacatataataacggtagatttacaaatatagaagattggcgacgtaacaatgtaaatgaacttgtaaaagatttaaatactgctataaaacaagaaaaatcatatgtaaagtttggcattagtccgttcggcgtatggagaaatatagctgacgatccgactggctctaacacaaccgcaggccaaagaaactatgatgacctttatgctgacacacgtgagtggatacaaaaaggatatattgactacattacaccgcaaatatattggaatataggtttcaccccagctgcatatgacatattagtagattggtgggttaaagaaacaaataacaaaccgattcacctatacatcggtcaagcggcctataaaattaataataactccgtccctgcttggtctgatccagaagaatatccaagacaaattgcattaaaccggctatatcctgaaataaaaggtagtatgcattttagcttaaaagatattaataacaatccacttggagctaaagatagactctcaaaagacatatataaatatcctgcattaattccgcctatgccttggcttgatcatgatccaccaaaacaaccgactttaaaaggtgccattccaagagatgaaggtattgcaatcggtatcattgacaatagagataatgattctacttattacgctatttaccgcgcgaatgggaaaaatgaagtggatatacaaaatccgaaaaatttacttactactgtaagaaaaacaaaacttggagaaatttatgtagataaaaccgttatttctggagaaacgtatacgtatgtcgtaactgcagttgatcgattgcataatgaaagtgtggcttctagtcatactaccgttaatgcaaaataaaatctcataacaaaaagcgccctaaagctgtgatacttagcttttaaggcgctttttgttatttattcttaaacttctcagtcgctgctctcatcttcacatttaaatcgtgatcaattgagtcgcgaatatctcgctctactacttccatttctttttggaaattttccaagtagattttcagttcttcttctttctctggtctttgtgaaggtggtaattgtactaccaacgataacatggccgttaaatctttcattaagaacgtttcaagtttatgttgttgttcaaacatgcgttgctcttgatagtacggaagtgcattcaatactgaaattgtaatatcatcaaccgttctttgtaatgaaggatttattgagcgtttatacgcttgaattgtatttaatgcgtctggataacggtcataaaaatacaatttgtaaaatgataagtctgtcggttttacagtttgctgtgtctcttgtcttaagaaatctttcactttcatcgcagctacatcaatatcttcattcgtaagctttttcgtagtttttgccattacatgcacttttttctgcttttctttcggtaacatcgagaagacttgttctctcgtacgttgacctgatgcacaaaatagagtatttaatgtattttgttctttctttccttcagtgcgaatccagcgataaaacagtggatgttgtgtaaattcttgtagaaacggtattgatttgtttgataacttgtctaaagaatcttgcgctcttttatatggcttcgtccatgaaaaatacagcttccgtccgaaatatacgactaaaacaacgacagtaaatgctattaaaagcaatgtaccgagtagtaataatactgtttgaatgaaactcatttgttcacctcctctaataatccgttatttccttggacgctgaatgagtttctgcttcatctcatcattaaatgtgtctagttcaataacgaacttcttacttgactcgataatacgttctgacgatttttcagatgcttcaattgcagcgaacacattttggaatgattcacgtaatttatccatgctaatagcagggttttcaagcaattttgtcgtttcttctgtattttgttttaacgcttgagaattacttaataccatcgattcaattgcttcatttgtcgcattcactgcatcgattgttttccgttgatttgttaacgctaactgaatagcagctgaaaccgttacaacgttttgcgtcatcgtaattgcattacgaattgcctctgttaacttttcattatttttcttaataatgtctacagatgcgatagattgtaataaaacacttttcgcttgctgcatattacgtgtacgtacaagtatcttttctaacgcatcgttaattaatggaatatctctttgacgctctgggttttgtttctcagcttcaagcatgccagcaagctttttccctaagtatacttgtttatcaagcgcatgaattttatcgtgcgattgttctttaagcatttcaagacccactgtatcctcttgtaagttatcacggccaattagaagggatctaatgatttcctcgatttgtttatctatagattggtatttatgcacgtatgtttcaagtggatttttcttgaatactttaaacattattttcttcataccacttgctttaagtgaattgggatcaagctctgataccacttttcgtaattctaacaatgtatttggaatttcttcatttttcccattcatcatcgctgttacaggacgttttaatgctgacaacgtttgtcctgctgcttgttgctctttatctcctaaatctcctagctgagacaatacttttgataaatctgtattttgctcgctatttaacttttgtacataaagatcagcttctttattcagttcctctaattctgcatcttttataactgtatcaactactacttctacattattatctttcatgatcgatacaggttcttttttctcgagttcagtcaacaaaatcgctcctttatttatatgtgcgaatttatatgcactatatttcatctattatatcgtatttcatatacattctgattgcttgaaatcgatttttttagaaatgcctgtttatgcagtcattccctgtttcttactataagtatacctgtaaacaacataattttcctcagacttaagacctagagaacgacatgctgaaggcggattcttcgtatgttacgtatataaattatgttcttctatccttctgtactcaatcttttgacatacaccctttttcaatgtgataattatattgcgcccactcctatttcttcttgcgcgctacgaatgctccattttgaaatgccaataacaccgtttcaaacatttcatcttcttctatcatttttttaaactcggctaattcatttgcatgagaggttgcgttatcaacaacaagaaaaccctttggttgtaaaatgcgttttatatgctcaagccaccacatgtattgcgtacgctctgaatctaggaaaataaaatcaaatgaatgatctaattgcgcatctaaaaatgcccctgcttcttgattatgaacatcaatcctttgtaaaaggtttgccttttcaaaattgacaagtgcctctccaactcgttctgaagaaagctctacagttgttacatttccatttgtttcttctaccgcattagctaaccacaatgtagaataaccattagaagttccgatttctaaaatgttttttgcgctacacccttttactaaaattgataaaaattgccccatctcacgagtaatattccgtaatttttcttcccttgtttttttatttcgatcatgctcttctccatattgttcaagttgaaataataataaatctaacgtatccattttttccatcgcctttccaaagcaatatgatgaaaaagctcttgctgcccgtctactttcattatatgcgaaacaaaaacctttttcctgttatatgacaaagatttgaatttttttatagcatattgtttcgttttttggtaaagttaatttctacgtgcaattattccattcatattatttcatattaaaattgcagttattaaattatataaaccccatttaaatgaatcggtatttcaaattcaattaagcgcccttttcggacgcattttctttgtttatatatttccagaagaaaggatgcttacaaatgaacgtgattagcttagatgctgctagaaaacgaaagcagcataaaaaattaatgattactataccgattattacacgtatttatgaagaagacggggaaattaaatttgaggtagctggcgaaaaagatgtacctcttgaaatgttagaaaaataataaaaaacgcatttctgaagaaatgcgcttttttatatttttacatttaaatgcataagtttttcagggttaaccatcatataaatatttgaaattttctcatcctcaaatacaaacgaaagaacataagttactttattatttattgtaactataactcctggtataccattgaccattttgaaatcaacagtgtactcttctgtcaatcgttgtgcaatcccaaagaacaaacgtataattcgatccgcagaataaatcgggttaatcgcagtcgtaactttaccaccaccatcagctttgagtatagcatctgtttttaatacttctaacataccttccgcatccccacactgtaatgatgatacaaacttttcaacataagaagccattttctccgtgcttaattttgattgcttcggtttctccaacatgctttttcgagcacgttgaaagatcttcctgcagtttacactactcttatcaacaattgaagctatttcttcgtattcataactgaaaacttctcttaatatgaaaacaatcctttctacctcagataattgttgtaaaagtaataaatatgcggtggaaagggattctttcattataaatgactttgatggctcatcactctcttctacaattggctctggcaaccacatccctacatacacgttacgtttatgcgctgccgatcgtaatttatcaattgaacgatttgtcgccatcttacataaatatgctttcatattttctatagattgaggatcttctatattatttagcaagataaatacatcctgaacgatatcctcagcatccataacactcccaaggattctgtatgctaacgaaaataataatggttgatacgcttcatataactgctccgtttccatgatgaactgcctcactttcatattgctttaaaatgtataacgctgcacgcttcccgcttgctaccgcagcatcagctaatacttcatcatgccctacccaatctcctgcaacataaacacctggcatttcaggtatattagggcccgctttttcaacacggtcaatatgaggaaaatcatgtactactgttattttcggtaaatattgctgtgcaacaacttctcttttccaatttggatgtaacaactccatcgtactttccaactgttctttatcatcacgaatatgattcatctcgagtacaggattatagtacttaattagactcactacaattgatccatcttcacttaatttagctgctctcgattgatttgtgaaaaatataggttgatctaatcctaatacaaattgatgtgtaggattgggtaattgtctcaagccaatatctaatgcagcaacagtaaccggtacagattgttcactccatctatgcaaacttgttccttctgcaccttttattattttacaagcttctttcggcggagtcgtcacgatgactgtgcctacttcaaaaacctcatcatcaacacaatgtattctttgtttaccttcggaatgctcaatttccacaacatgctttttagccaaaaactgcaccccgatatcattcgctatagctcttaattttgttattatcgtctcccaaccaccatctacataaagcactccctcttttatagaaagctgtatttgctttagtacagatgatgctaattgtattgtaggagcaaacgtatatgttgttgttcggcatagcgcataaaatatattgcgaaccattggatcttttatttcattttctgcccatgtagttagactcattttcggaacttctcctacatctaaatttcctaaacgaatcataagacgtgagaattgtacttttgcagaccaagaaagtagtggtgttgataaaattgagtaaaaatctgttgggatagtgaatatatcccctttccatattccatgtgcttttgtagatggtattccacctggaagagtcataccaagctcattaaaagttataaacgctgccccgcctctatataaagcatgtgcaccaagattcatgcagatttcatttttatttgtagtcatccctcggccaccgaattgactggacttttctaatacaatcactttccttccagctttcgctaaatatatagatgctgttaatccagcaagcccaccgccaacaattgctatatcaaatgtattcataataaaatccctccttaatcgttctacatacaagacgaacgattaaggagggatgtgacataaaaataaatttttattatcctactttatttcattactttttaattcgatcatattgcatacgaaataactcaattgcaaatggaatatcctcttcactctttaaataataactaatccatcctgattcaggtaatacgtgatgtggttttaccaagccttgcttcactaattcatctcgctttaactttggaaatggtaaatcagctaatttatcaccatgaagatggccaagttctttcttgccataatttatttcaataccaccaaatcgatgcggtttttcagaaacacccgcccagctgagtacttcatttctaatcatttcactaaatgacatgaacattcactccttataaatgattgatgtaattttaaattaacattttcattacttttttccatcaatccaaagtatgaatgggaatacgaatatagtttggtcttaacaccttattctttatggaataagtgaatttattaagctaccgacaacagcacaaaacaaagactagacacatatcctaattttgtaacctaacttacctatagaaaggcgggtaatacaattgactgccaacatcgactatacctccccctcaaccaattttacttatgatgtaaataaaagtaatttttttcggaaagatgcccaaaattatataaatgtacttggtattaaacaattaaatactttagaaaatacttctttattagatatttatttaagtacaggaaatgttgtagaaccacatattcatcaaaatgcagctgaacttgtttattgtatttcagggtctgctgttgtttctttacttaatccatttacgaatcaaatattaaacttaccgataaaacccgggcaagttgccaacattccacaagcgtggtggcattatgaaattgctacagcaaataatactcatttattagctattttcaatgctccagcgccagaagttattttcggttctgacattttaagattaactcctgctcatatgatggcacatacttactgcctcaatgaacaacaatggaaacaagcggtttcccctattcaatcaactactgtaattggtcctccgtcaaactgcaatcaaaaccgtgaaatgaaaaattatccaacccagcccctcgctcaacaacataatccgcatcaccaagattcttattacttccctctttactggggctattaatttgtaaattttcaaaagaatcatcatttatctcctaggaaaataccaaggagatttttttattgtatcttctcttcctattaaaaatagtaacaattgatagtggacatacatataatatttatatattaaattggaggtgatagtactatgagtaattataactatcgaaaaaactactcttataataaaaatagtagttcttcagcatcctctcaatcttccaattcccaatcgcaaagagacttagcggagcaaggctatgtaaagaaaaaaggatgtaactgtaataaaaataaatagtttatcttatggatgaattcttttttaaaagaattcatctttttttactgatcggaaatttttaaagttacataacttattacttaaatgagaaagggtaaattatacttttttatacgaacttaacaaagagtaattgttcaattaatttattacttattttcctaaaaaatatagtccttcctaaatttattaggaaggactatatacaaacccctgtttaatttcctactaaacattgtaacaaattaaacgatattaatacctgcacttacaaatccagcaactgcagctattggacttgctgctgttaatgaaacatataacagtattttatccccagctgctactggaatagcttcaggtatgattcctgatgctgtagaaccaatcgctattgcggcaaatgctggcgttaataatagaggtgcaccttgtactgtaaacgtattgcttgctgcaggtgcagttaatatttgtatttgcacttgaacaggtgataatggagataatgcagctgttgcactaaagaaacctgctaatgacgtaatagttcctgcgcgtggtgctacaaatgcataatcacctacacctaatgctaatgtgatacttgttccacccgttaacgctataccaggctgactaaatccaaatccgagaagagttcctgtattagctactaacgcattaactaatgctgctggtgttgtacctgaagcaaacggaataatagctccgccaccagttgcacctgttgctcctgttaagcctgttgcaccagttaaacctgttgcccccgttggacctgttgctcctgttggacctgttgctcctgttgggcctgttgctcctgttaaacctgttgctcctgttaaacctgttgctcctgttgggcctgttgctcctgctcctgttgctcctgttgctcctgttggacctgttgctcctgttgctcctgttgctcctgttgctcctgctcctgttggacctgttgctcctgttgctcctgtcgctcctgttgctcctgttgctcctgttaaacctgttgctccgcctcctggacctgttggacctgttgggcctgttgggcctcctcctggagtagcaccaattaattgagttaataaatttaataaaagttgtaaacttgcagggtcaataattaaagagaaaaagaatggtgcaagagcactgtagaattgttgtaataaagaaagtaattgacttagatttgggttaggagattgtagtaaattaataatactttgaattaattgttttaagaaattcccttctggagaaggtgctaattcatttagtaagttcaatagttgagtaaacaaattgagtaaagctaatctgtttgcatcacttggatttgcaaaaaacgctgcaatagccgaaattaaagagtttagtaaagtaattaatctacctaattgctcactagtaatcggaactgtttgtggattgttacaacactctggagtgaaaacaatcggattattgcagtggttatgaccgaaacaattattacttgtcatttatgtcctccttacttgttttatatttgagtttttcctattataaggatcataaagttgtaaaagagtatgtgttatatattgacttaaaataggaaacatgaaatataattaaacttgcaaacgctatttaattatgttcatgactcacatattaattatatgtttttaataattgactgcttagattaaatacctaaacttaagagtttattttatttttccacgtttatctcttaggttcaaagacacattttaatttgaatacaaaaaccgaatttacgattaacatatattccgcaagtaacaacatcattttttcatataaataaagaacatttccttactaaaattgggctcaccttataaaggtgaagccgtttctattataaaaaactctcatacaatatagtggacaagttattttatacttcgttctaataaaatattgtaaggagtgaaaattaattgcctatcattcaaccatttatggcatctagaagatttacatccacactaggagccggcacaggtacaggtgcagcttttgcaattgctgccacagcttgtttaaacgatgcgggtactactgcaaccgcttttccgactttcacgtattacaacttatatgtgaacggtattcttcaaccaagcgtgaactccagtgttactactggtcctactggtgctattacaattcctggtggggatgcattagacggcggaattccaattacaattgaatttatcgtcacttaatgttaacgaatgtaattcagaacaaaaaagacagattccttttcattaagaatctgtcttttttaattaataataataaattgtaaaataattgaagcaccttgcgatggtggttggttatccaataaagttagtttaccagtactaacttcatagaatggttgtggttgcaaaattccattgataaacaaatttatatacgaaacctcagtaggtgatagtatattcgttgtaccatattgagctatgccatctgcatctgtatatataagtttctctccatctgaaaaagtgtaaaataacaaattagttgttgttatagggccaatccccccagtaggacctgttgctcctgttacacccgttgctcctgttgctcccgttactcccgttggtcctgttgctcccgttgctcccgtttctcccgttactcccgttggtcctgttgctcctgtttctcctgttgctcccgtttctcccgttgctcccgtttctcccgtttctcccgttattcctgttattcctgttgctcctgttggacctgttgctcctgttgctcccgttgctcccgtttctcctgttgctcctgttgctcctgttgctcccgtttctcctgttgctcctgttgctcctgttgctcccgtttctcctgttgctcctgttgctcctgttgctcccgtttctcctgttgctcctgttgctcctgttgctcccgtttctcctgttgctcctgttgctcctgttgctcccgtttctcctgttgctcctgttggacctgttgctcctgttgatcctgttgggcctgttgatcctgttgatcctgttgggcctgttgatcctgttgggcctgttactcctgttgctcctgttgctcctgttgctcctgttgctcctgttgctcctgttggaatatatattggtggaagagctgaaaatgtaggtccaatattctcaggttctatcttacctttatttattgataatttatcattccgcttcaatttaattcctcattccacatatttttaattaacttacataagtatgagtctattattaagaaatgctttcataactattcttttttccttccaaatgattcatacatatattaaacattttaccgttgctataactcctattaatataataaaatgatagttccattccaaaaacacgaaacttattgcattctaatttaaaaatgaggtaatttatactcaagataaaaatgaaaaaagaatagaaaaactagtatcaacgactcttgaaattattcttccatacagacttactgaacctaccagaaatactgggtcaatagttacaacaaactctatgttcgctaataatacattaggtgatcccatcactgtgatattaggcggaactaatattcctctttctaataaccaaagcctcggtaattttacaattaacgcctcaaacgatatatttacaattcctgtaaccagaagatagcatttaacctatcaagttaatacgacaactgctctactcgctggaacaaaactactattaaacgcttctactccacttcctggttctattttttctcccgctatatcaacttcaaattataacaataatttaattgccgatactacaatttcacttcaattattcgacgtattatacatcgttaatttggttggaggtggttcaacaggtgcctctctaacaattatacgaatcgatttaaaaatgattcattctttttctaataaacattattaaatactaagtctgtcatgataagaacctcccaattatttcataaaagtggtggcgcattaaagaacaaattgcactatattcatagtagaaactatctatactaaattttccgtatatatattatcaatttacactgacttccaccgatgttacattaaatatgaagacagtttcttttttacgaaccatctcaatacgtatttgagaaacgtactccaatcctatacgcgagagcaatactatgttgacactcagatgagtgtctttttttgtgagtaataaaaaataaaaaccatctcttaaagatggttttatcttttgttactataaatgtaaacttatgcagttggataataaattgtcatgcttaatcgagtcaaagattcccctaaattataataagagtgtgatctatcggccttaaaacgaattgaatctccactatttaatttatattgacagttattcaattttactgtcaattcaccttcaaataccgttataaattcttctgcgccttctttatgcccttctgaacttaatttcccttctgtttctatttccactgtatacatttcaaaatgtctatcatcttgaaatggaaaagaaggatacactttatattttccattgtcttcagacaatacttgaatatcttttcttaaaatcactttcgtatcaggctgaggattattgattaaagaagtaaaagaaactttcaagccatttgcaattttccatattgttgttagtgtcggacttgattcccctctttcaatttgtccaatcattgttttacttacacctgttaattgagagaccttttctaaacttaatttttctttttcacgtattgattttaaattttttgccagaataagttgaatttcttccataaaaaacactcctacaccgcatacaatataacgaccgttatgtataataaaaagcacacgttatattgttctttttgatcattataacatacaaaaattgggaggttttgaaatgcctatattttcttttttgttatttgtatttataagtagcttcacacctggtcccaacaatttcttagctatgacatacgcaaatcaacatggattaaagagaagcataaacttttgctttggagtagcattcggttttttcatcctcacttctttatgcagtttctttaatattgttttaattaatattatccctataattgaatttcctttaaaaattttaggtgtcgcgtatatgctatatttagcctttaaaataattactagtaaaggcggtgcagatcacaatgaaaaaaataataaaaacttatttacagtgggtattttcattcaatttgttaatccaaaaggaatattattcgggctcacagtagtctctacttttatactcccctactacaattcatattcaagttttctgcttttctcattatttctaggtatagtcggtttactaagtacatttagttggagtttatttggttcaatattccaaaaaatattagtaaaacataaccaattattcaacatcattatggctgttttattagttttcagtgccgtttcaatcgttatacactaattcgatgctcattttagattttgtactttttaataccactctttatcaatcagactactttatatactaatccatccacataccctatgtggtttaaaacttttaagaggaaaccttctaacaataggtttccttccatatcatattaaataagaagcaggttaaatacggaggtgattttgattaagactactttaatttctcatttttacaatgaagaatatttacttccatggtggttaatgcaccatacaaagctatttgatcatggcattcttattaatcgtggatccactgatcgttcagttgaaatctgtaaaacattcgctcctaattgggaaatacgaaactcaaaatcactcgaatttgatgcttatttagttgatcaagaagttatggaaattgaaagagaaattacaggatggaaaatggtattgaatacgacagaattcctgtgctgttataataaagaacaatttttcaaattacttagcactatgggtggcaatatgttttcaataagaatgattatgatgattgatgaaccaagttatggctacactaatccaagatatagctctccgcttgttaaacaacgttatcacggcataataactcaacctaatccaaaccaactatatcttaacggtagattaattcacaataattcgcacgggaactatagagtcgggagacatggttcgcattatccttatagcatttacatggaacctgcttttatttttaaatttttttatagtccatggaacgatgcaatgaaaaaacgaaaattacaaattgggccgactctttctcaacatagtgtacagcgtggactaggttcacatcacttaacaacaattgaaaaattagaaacaaaatacaaattctatgcaactttaactacggacctccggttattcccagaataccaaattatatttcctgacctttatccttaatgtcatgaatatttagtttccacatccatccgttttttattaacatatcaactccaactaaatatttttctctagtagaaatctgagctaggactcttgctgcgcgcagattcctcttatttaatgtcgtatcaccagcctataatctttcataccatttcattgagtacctgatgttggattagaaataaaaaatggcaattcatttggaaaattttcaatttcagattatataccttctaaaacaaagtattaaaacaatagaacctaaactaatgtcttaagttatggctttatttttttcttattattcactttaaaatctttttataataatattgaaaaatacagtataatataaattactgttctttgggagggttataatgtctgataagtataaaattttcattcttattgttaccgcatctttttctttcttttccttaataaaagatttccgcaacacttcaaaaagtttcttttggggtagttttgtaattcttacaagcttcataatacttttaacactcgctttagatttaactcaaatactcctatattcagcgcaaattgcgcttgaaattattacaataccacataaactctttctaccatctgtcactgaagccgctattatttactaaaaaagtattttaattttcttatgcatgccaaaatatattttggtaaatttgacacacatttatatcaaacaagcatattttattgtatggtgactatctaataatacaaatttttaattttcataagatctttttatttttaattaaaaatttacaacattctaaaacagtatgcacataatatcctccattccctttttcaacatgacacttgtctcagagcgcctttaaaagcgctctttatctttaataaaggttttattaaaatttaggttaaaaattaataccctatagtcataatagctatttactgtttccaaaataagttgcattaataatatagaaatgaaatacctataaaaattattactttactatttctttaaacatgctagtgaggtgatttcgatagattatcaaaacaaagatatgttcattaacttttcacttttagatattaaccgtattattctcccacattctcctactggggctaccggctctactggagctactggagctaccggacctactggagctaccggttccactggacctactggacctaccggttccaccggacctactggctctactggttccactgggactaccggggctaccggttccactggacctactgggactaccggggctactggctctaccggacctactggacctaccggttccactgggactactgggactaccggggctactggagctaccggggctactggctctactggttccactggacctactggagctaccggttccactggacttactggctccactgggactaccgggactactgggactaccggggctaccggttccactggacctactgggactaccggttccactggacctaccggggctactggctctaccggacctgctggacctaccggggctactggctctactggttccactggacctactgggactaccggttccactggagctaccggggctactggctctaccggacctgctggacctaccggggctactggctcttagtttgtctagcatctaaaataaaaattgacgtttcacgttgtttgtttcgttcagttttcaaagaactacttcgtcgctcagaggcgactttattaatataacatttcgttatattttcgtcaacaacttttttcaataagttgtttttcgtttgttttgtttgttacctttcgtggcaacgaatataaatataccagtttgattattaaaatgcaatagtttttctaataaaatttttaacttagtaaaaaagtataaaaacagcacatttcttctatataaatataatttctcgcactatcaagatttactatacccacgcaactcatgctcaaataaaaaaagctttggagaaatctccaaagcttagtcttgtttatggcgcatagcagggaataataatacatcacgaatagatggtgcatttgttaataacataactagacgatcaataccgattcctaatccacccgtaggaggcataccgtactcaagagcttcaatataatcgtcatccatcatgtgagcttcgtcattaccttgttcgcgctcttttaattgcgcttcaaaacgttctttttgatcgattggatcatttaactcagtgaatgcatttgcatgttcacgcgcaacgataaataattcgaaacgatctgtaaatcttggatcttcatcattctttttcgcaagcggcgagatttctaccggatgaccgtaaataaatgttggttggattaatttatcttctactttttgttcgaagaattcatttataatatgaccaacttccattgtatctttaatttctacattatgttcttttgcaagttcacgcgcttcttctacactcatcggattccagaaatcagctccagagtattgcttaatcgcatctaccatatgaagacgtgtccattctggttctagattaatttcataatcaccatactggattgttgttgtacccagtacttttttcgcgatatgagcaaccatatcttctgttaacttcataatatctttataatcagcgtatgcttcatataattcaatcatcgtaaactcagggttatgacgagttgatacaccctcattacggaatacacggccgatctcatatactttttctaaaccacccacaataagacgctttaaatgtagctcaattgcgatacgcatatataattccatatctaacgcattatggtgtgtagtgaaaggacgcgcagaagctccacctgcaattgcatgcatcataggtgtttccacttcaagataaccgttgtcatctaggtatcttctcatctcacgaatgattttactacgagtaacgaacgtttcacgactttccatacttgtaattaagtctaagtaacgttgacggtagcgttgttcaacatcttttaatccatggtatttatctggtaatggacgaagagatttcgttaatagcgtaaagcctgttgcttttactgaaagttctccaacgtttgttttgaacactttaccttcaatacctactaaatcacctaaatctgctgttttaaataattcgtactcgtcatctccaacagcatctttacgaacataaatttgaacttgtccatgtaaatcttgaacatgtgcaaatccagctttcccttttccgcgttttgtcataatacgaccagcgatagaaacagcgatttccttctcctctaattcctctttagagaactctccatatagactcactaagtcagttgttgaatttgtgcgttcaaatcttttaccgaacggatcaattccttgttcacgtaaattatgtagcttttcacgacgaacaatcaattggtcgtttaattcttcgtggttcatgttatccatgatattgatatcactccagctctatttaattttacaatatatacagtatagcattttctactcaactagaaaaactgccagcaactaactggcagctcttctttctttcacgtaattataggaagtgtatagaagaatgtcaatctcctatgtccattattaaccaacgtaaattgtttgttgtttcgcttccacttcttctacaaatgtacctaacacattcgcaaggtcttcccgtgtgttacaagcattaataccattacgtacactcgcattaccacgaacaccttttaaataccaagctgcatgttttctcatctctcttacagcgacactttcattctttaagtcgataagacgatctagatgcaacatacatacatcaattttctcgcgcactgttggttccggcattaattcacctgtctccaaatactttaccgtacgataaatcatccacggatctccaagagcagcacgaccaatcataacaccatctacaccaatttcatcaagcatacgctttgcatcttgcggcgttgcgacatcaccatttccgataaccgggatatttacagattgttttacttgtttaataatatcccaatccgcttttccttcatacatttgcactcgtgtacgtccgtgaaccgccacagcttggccaccagcacgctcaacagccctagcattttctattgcgaaaatatgttcttcatcccaaccgatacgcattttaactgtaaccggcttttcaacagcatctacaaccgctgctaccatttcatatattttattcgggtctaaaagccaccttgctccagcatcacatttaacgattttcggcactggacaacccatattaatatcaattatgtctgctgtcgtatatttatctacatatttcgcagcatctacaagagtttctttttctccaccaaaaatttgtaaacttaatggcttttctctctcgtcgatatataacatatctaatgttcttttattattaagtaatattgccttatcacttaccatttcagcacaaactaatccggcaccaaattcttttactgttaaacggaatgcagagttacacactcccgccatcggtgctagtacaaccggatttttcatctcgatatttgcaatctttaacaatcaatctactccttcctgtacaatcactttggcattaattcctctatcgaaacatttaatgccttagcaacttctactacaaaatcttgagaaggcgatctattccctctctcaacctcacctaaaacagatacagatacccctagtgctttagcaaaaccttcttgtgtgtaaccttttagctttcgaaaagcacgaatgcgccttccccatttttctgcttccataccgttactccctctcgccttttcatttcttctacttgtgaacatgaaatgttttgttttatgtcttgattaatttctaacaacggaacgataacaaaagctctttcaaacatccgcggatgcggaacaataagattctctgcttcaatattctcttgattataaagtaaaatgtcaaggtcgatagtcctcggcccccacctaatttccctttttcttcctaggtcattttctactttttgtgttactttcaataattcttgtggtgataaattggtagaaatttttataactaaatttaaaaagcaactttggtcagtatagccaactggctcagtttcatatacagatgaaatatcatcaacctgaatataaggatttttatttaaaaactgaatcgcttcggttagatacgtataacgctctccaatatttgatcctaatgcaatgtaagctatattgttcatggacgttctctcgtaatttctactgctacagcacgataatgacccggtatcggtggatccggcttaattaccttaattgtacagcgcgaaatactttcatattgttttaatatatctgcagcaatattttcagcgatactctccacaagcttatactttctatcctcaacaacttttctacataattcgaaaagctctccataattgaccgaatgctctaagtcatcactttcccctgcacgctttaaatccaactccaccgttaagtcaactttaaatctctgacctaatttattctcctctgggaacacgccatgataaccataaaactccatatcatggatataaattttatccaattaccttacccccttaccaatcatcgcatccatcattttagccatacgcgccatttctttcacatcatggacacgaacaaactcacagcccttttcaataccaagacaaacagtagctcccgttccctcaaggcgttcctctactggcaaatctaatacgtgcccaataaaggactttctcgaagtacctaagagaaccggataacctagcacatttaactgttctaaattacgcatcgcctctaagttctgctcaggtgttttagcaaaaccgatacctggatctaaaataatattctcatctcgcacaccagcatttttagcaattttaatactgtcatacaaatcagcaatcatatccgccattaaattacgataattcatgtcatcgcggttatgcattaaaatgatgggtacatcgtaatgagctgcgacttcagcaattttcggctccgccttcgctccccaaatatcattaataatatgagcaccagcctcaattgcttgctttgcaacttcagctttatatgtatcgatagatataggcaattttacttcttttgaaactgcttgaatcatcgggacaactcgctttatttcttcttctactgatactttagcaaaacccgggcgagtagattcgccaccaatatcaataatatgagcaccttcaccttgcatttcttttgcgtgacgtaccgcagcatctacctcgttgtaactcccaccatcagaaaacgaatctggtgttacatttaaaatccccataattaatgtcttttcatttaaattcaatgtatattcgccgcagcgtaaatcataatcccacttcaaactacacatctcctcttcgtaattcatttttgctccataatttctctctttgcattccataaaggtacattaaactttttgtaaccactcctactttacccgggaaatcctgcgcttctatacgataaagcggaacaatttcttgaatggagtttgttacgaagacttcatccgctgaaagcagctcatcttttgtaaagaaaccttcctttacttctatatttaattcttcagcactctttataataaacgcacgagtgataccatttaaaatccctgtctctaacgaaggtgtatataaaacatcacctttcacaaaaaatagattggaaacaataccctctgcaacataacctgcttcagtaagaaaaataccttccttactcacaacatttccaatttcacgcttccctaaaatattatttaaataatgatgagacttcagacgaaatgttccttccggtgtatttcgcacttgttttagaataacaccttctttttccactacatctcctggagctgttaaaggttttataaaaacaataaccgaaggctcttcatacatttccgtttgtaatcctatttcatctatacccgctgatacattaaaacgtacatatgcatgcttcaattcattcttagcgagtaaatctttcaaaataagcatcacgtcattttttgtcattgtccatttaatttgcaatgtatccagcgcttctattaaacggtcataatgatcatccaataagaaagggtgaccattataaatacgaaacgtttcaaaaactccaagaccatataaataaccatgatcataaggagaaattttcgcttcacttgcttctacatactgaccatttacgtaaattaacataacgttgcacttggactgtatttacaaatgaaattctgtaacaactctttcccatgagaagtcataatagattccggatggaattgcacaccctctatcggcaatgtcttatgacgaagtgccataatttctccttcctctgtccaagatgttacctctaagcaatcgggtaacgtctctttcttaacaataagggaatgatagcgcgtcgcagtaaacggattaggaatatccgaaaaaatcgtctttccatcatgatgcataagcgacgttttcccatgcattaatcgttctgcacggacaacctctccaccaaacacttgtgcaatggattgatgccctagacaaactccaaaaatcggaatctttccagcaaagtatttaataacttccatactaatccccgcttcattaggactacatggacctggagaaatcattagaaaatctggtttcatattctcaatatctgaaatggtcacttcatcgttacgtttaacaacgagctcttgtccaagttctccaagaaactgcactaaattaaatgtaaaagaatcataattatcaatcattaatatcatttctctcacctaaccgtttcttcgctacgttcttttgcacgccataaagcaatcgccttttttaacgactctttatattcattttctggatttgaatcaattacaattcccgcccctgcttgtacatgagcttttccatctttagcaagaagtgttctaattacaatattcaattctgtatctccagaataaccaatccaaccgattgaacctgtataaatccctcttcgaacaggttctaattcctcaataatttccatcgtacgtattttcggggcaccagtaattgttcccccagggaatacagccttcactaaatcaaaagcatctttatcttcttccacctcaccacgcacattagaaacaatatgcataacatgtgagtatttctcaattaccataaattcatctacttctacagtgccatatttacaaacacgtcctaaatcatttctttctaaatccacaagcattacatgctctgctctttctttttcgttctcaattaattctcttgctaattcttcatcctcttgctcatccgcgcctctagatctcgttccagcaattggtcttgtacttacttcagttccttgtttcttaattaacaactctggcgatccactaacaatttgaaaatccccaagctccaggtaacccatatatggagatggattaatttcacgaagacttgtataaatttctagtgggtgtgtctgtaacgttctttcttgtctcgtcgacaagtttacttggaacacatcacccgccccaatatattcttgaatacattcaactgccttcataaagccggcttcagtaaaagcaactgcttcacttttcttttcaggactttcaaagggcacagtcacttcaggcgcttctgtcatccaaagactcttccactcatttagccgttcttttgcctcttcatatttatctacataatgcgtaataacccataacacttgttctttttgatcatagacaaatacgtcatcaaataataaaaagaagatgtcaggtatattaatatcatcttccgcaagagaaggcagcttttcaatataacggatacagtcataactgaaatagccaattgcaccaccttgaaaaggcggatactctgggttatagtccgtcttccattgttccatatattcttgcattaaatctaacggattccctcgttttattgtttccttaccactttcacttatatgtaacgtttcatccttccctcggattaccgctactgggttcagccctacaatgttataacgaccgccacggccactttctaacaaaatatgttgcgatttaccctgagaaagaaatttatattgcttaaagaaatctaactgatatggaatagaaagcgctaaagattttcttcgttgcatatcaacaccccgtcttcttttatcccaccctcttagattaaccagctcaaactacataagttatttatatagagattgattatactcgaaggctagtgaaaataatttaattatactacctcttattttacatgaagttttctagtcattcactcttttcctatttccaatcccaaaagaaaaagcaccctttttcaaggatgctttttcaatcgcgtttaattatgattcaaattgataaagtggtgtacttaaataacgttcaccgttactcgggataataacaagtacctttttccctttacctaactttttcgcaacttctgttgctgcataaataactgcgcctgaagagataccaactaaaataccttcctctttagccactcttctcgcatattcaaatgcttgctctgttttcacttgaataatttcatcatatacttctacatccaacgtctccggaacaaatcccgccccaattccttggattttatgtggacctggtttcccaccagataatactggtgaatctgcaggttctactgcataaattttaatatctttatacgcttccttcagtacttcaccagcaccagtaatcgttccacctgtaccaatacctgcaataaacgcatctaattggtcacccatttgttcaataatttctggacctgttgttaaacggtgaatttctggattcgattggtttttgaactgttgtggtataaagtagccatgctcttttgctaattcagtcgctttacgaattgctccacccattccttcaggccctggagtcaatactaattccgcaccgtaagcacgtaataaattacgacgctcaatactcattgtttctggcattactaagattgcattatatcctttagcagccgctaccatcgctaaaccaattcctgtgttaccacttgtcggctcaatgattgtatcgccctcttttaataatccatttttttcagcatcttcaatcatagctaatgcgatacgatctttaacgctactccccggattcataaattctaattttaagtatatatctgcgctgtctgattctacgatgcggttcaacttaacgatcggcgttttcccgattaattctgaaactgattgtgccactcgcattcctgtcactcctaacaccgagtatttttattggttttatctatatttagattttgtcagaaaattccctgtttgtcaattcatttggaggattgctcctcttaattcccttattacaaattctcgattaaatttgtaatatcttctttagagaacttgtatcgttcattacagaaatgacagtgaacttccgtctcttcctcttcttcacgaacttgctctaactctgttttacctaaactaattaacacactctcaatacgctcgcgtgagcatgtgcaattaaattgaacatccattgtttctaatacttttactttatcttctccaagaactgcatatagtagctcttccggagaaagtccttgttcaatcaacgttgatacaggtggaatcttttgtaaacggtcttcaataaatgaaatcgtttcatcttgcgcacccggcataatttgaaggatgaatccacctgccgctaatatgctatcatctccatttacaagaacaccaacacctacagaagaaggcgtttgttcagaaactgcaaaataatacgtaaagtcttctcctaattctcctgaaacgattggagattgaccaataaacggctcacgcattccaatatctttaattacagttacaaacccctctgtacctaccgcttgatatacacgtaacttcccttgttctgttccttcaaaatcaacatgcggattcgttacataaccacgtacatctccatttgcatgagcatctactaagataggaccaatcggaccgttaccttctaccttaatcgttaacttttgctcaccttttaacattgcgcccatcattgtacccgcagttaaagaacgccctagtgccgctgaagctgttctccatgtatcatgacgtctttgcgcctcacttactgtatttgttgtacgtacactatacgcacgcacttctccatcaaacgctaacgcttttactaaataatctttcatacgtatttattcacctttctcatgctgtaaatttgcattacgttcatataacatgtataaaccttttaacgttaaaaatggatctacaatatcaattacattcgattcttcggaaattaattttgctaatccacctgttgcaataactttaggttcttgtctagcttcttctttcatacgcttaacaataccttccacttgtccaacataaccataaagaatacccgattgcatcgcacttactgtatttttcccaactacactgcttggttttgtaatttcgatacgaggaagttttgctgctctgctatataaagcctctgctgaaatcataattcctggcgtaataactccacccatataatgcttttcttcgttaatataacaatatgtagtagccgtaccaaaatcaacaataataagcggacttccatataagtggattcctgctactgcatttacaattcggtctgcgcctacttcacgcggattttcatatttaatatttagccctgtttttatcccaggccctactacaagcggtttaattttaaaatatttttcacacatgcgctctaaagcaaacataattggtggtacgactgaagacacaataatacctttcacatcttcaaacgaaagaccttcatgctcaagcaattgctttacaagcattccatattcatcttctgtcttatgacgatctgtttccatgcgccaatgctgacgaagttccccctcttcaaacacacctagtacagcatttgtgttccctacatccaatacaaaaatcatattctcaccacttatcttatttaatctatatttgtgcagtatgtataaaacttataaaaacatcatatcacacatacttatataatcagctttcctatcctcatcattttacaaaaagattgctctctatttcaatttttaatactagttttacttaaattactttatccactaagttctcaatagtaattaacaaaggttttaacaaacaaaaaaggagtgacgatagtcactccttcgtttcttacttatcttctttatcttcatcgtctttcttcatgttgatgtttactttcacatcatctgaagatgttggacgttctggcaatctgccgtaatcacataaatgattgatttgctcagcatctaacgtttctacttcaagtaacgtttttgcaataagatctagcttatcacgattttcagtaagaatgtcttttgcacgagcataacattctttcataatcgtttgcatttctacatcgatatcgtgcgcaattgcatcactgtagttttgctctgaatggaagtctcttcctaagaacacttgaccaccttgcgaactaccaaattgcattggtccaagcttatcactcataccgaattctgtaaccatacgtcttgcaatgcccgtcgcacgttggaagtcgttgtgagcacctgtactcacttcaccaaatacaatctcctcagctactcgaccaccaagtaaaccagtgattttatcaagtaactctggctttgtcatgaagtaacgatcttctttcggaagcattactgcatatccaccagcttgaccacgagggacaattgttactttatgaacgacatcagcttcatcaagaacaacaccaattacagtatgacccgcttcatggaaagcaacgatattacgttctttttcagagataacacgacttttcttagccggacctgcaataacgcgatccgttgcttcatcaatatcactcatatcaattatcttcttatcttgacgcgcagctactaaagcagcttcgtttaataagttttcaagatcagcaccagagaatcctggcgtacgagttgcaattgctcttaagttgatattctcatcaagcggtttattacgagcatgcaccttcagtacagcttcacggccatttacatctggacgatctactgtaatttgacggtcaaaacgacctggacgtaataatgctggatcaagaatatcaggacggtttgtcgcagcgatgataataataccttcgtttgcaccgaatccatccatttcaacaagtaattggttcaacgtttgctcacgctcatcatggccaccaccaagacctgcgccacgttgacgccctactgcatcaatttcatcaatgaaaatgatacaaggagcatttttctttgcattttcaaataaatcacgtacacgtgatgcaccgacaccgacaaacatctctacgaagtcagaaccactgatagagaagaatggaacgccagcctcacctgcaacagcacgtgctaataaagttttacctgtacctggaggtccaactaataggacaccctttggaatacgagcaccaacttcagagaacttacgagggtctttcaagaattcaactacctcaacaagttcttgtttctcttcatccgcaccagcaacatctctgaaacgaacttttttcttttcatcattatataacttcgccttacttttcccgaagttcataacacggctaccgccgccttgagcttggtttaataagaagaagaataaaatgaagatgatgacaaatggaatgattgaagtaaagaatgttacccaggcacttgtttcttctgctggttgatacttaacttcggcacctttcgctttatcattaattttcttttgtaattcctcagtatttggtgcataagtaacaaattgttctccttggctagagttattaaattgtccttttacctcaaatacaccatttttcggttgaagttgcacattacgcacttcaccgctttctagtttagtaatgaatttgtcgtagctaactgatgtcgttttttgtgtcgaaccattaaaatagctcacgattccaattactactaagaatatcagtaaataaaagatggtattacggaagatacgattcattcctaacctcctctcacggcataaacactatagtaaatcgtaacatagaaaaactttcctatacaattgtgaagcctatatttaattaatttgagtaaacgcttggttttaatacgcctacataaggaagattacggtactgctctttataatctaatccatatcctactacaaattcatgtggaacagtaaatccaacataatccgctttcagatcaaccttacggcctgttggcttatctaataatgtaacaatttttacagacttcgctttacgatatttgaataagtctactaagtagcttagtgtaagaccactatcaataatatcttcgacgattaaaatatcgcgaccttctacagaagtatcaagatcttttaaaattttcacttcgcctgttgaaactgtagagtgaccgtaactagatacagccataaaatccatttcaagatatgtatctgttctctttaataaatctgccatgaatggcattgcgccttttaatacaccaattgcaagaggtactgtgtttttataatcctctgcaacaattgcacctagttcgcgcaccttttcttgtatttgctcttcagaaattaatactttttcgatatcttgattcatcatttcattatcctcccggaagactccttgcttttgtagtgaataatcatatatttatccttctttgccatctctttcgaaattgcaaatgcagatcgcttcaacaagggtacccaaataatggtcccacttgcatcacaaacgaccggccattcttctcttttttctttcggtacttttgcttcgataaaaatagcttttatctttttcgtgccattcataccttgtattgacatgcgatctccattttccctagaacgaatacgaagtggatatgatatatcattatacttagcaacaaatactgtttcattcatgttacttggtatatcttcgctcacctctgttacaaattcatccccgttcaatagcgtaatggtcccgggtactgataaatcttgtaaaaaaggagaaacaatttcttgtttaaatctaaagctacactcctcgtatgtacgaacaattttcaaatcacctggaaaatcaagtgaacctgaaggttgtgtccgcttaaaaaactcaatcaccttgtcaatatgtatggaagaaagagaagatggaatcttatattcataaagatagtttaatattagttgaatccctcttctttgtaaaggcatagacatggattcaaaggcaggaattgataagctaatttgtttatcacttttttttgtaattactttattcattttctcaaaagctaattcctgcaaataagcctcatcctcttgcatctgcacgctaaatttttggaatttctcatgcacttgtggattttcttctttcaaatgaggaaggacatatttacgtaatcgattccttgtatatacttcctttttattactcggatctatacgtggcattaaatttagcttattacagtaatcaacaatttcttccttcgttaccccaagtaacggcctaattaaatacccattatgaaaaggacgcttcactgcaattcctgcatatcctttcggagtactccctcttacaagacgcattaaaattgtctcgacttgatcatctccatgatgtccaagagcaacatatcttgcatcatatttcttcattattctttccaaaaatgcatatctgcattctctagcagcaacctgtgcattcattccgtattgctgttgatattgtgatacattaatccttatcgtttcacaaataattcccagttcttcacaaaggccctgcacaaaccgtaaatcctcatgagattcatcacctctaaacatatgatccacatgagctactacaattttcaactgtttttccgctcttttttctaataaataatataaaagcgctaacgagtcaggaccaccagaaactcccacaacaattgttgaatcattctttaatacatcatgctgctttacaaagtcatctactttttcaacaaatgtatctttcaacttcgtaatcacctttcattaaacaagaacagcaacgttagttgccttgtctacaatggtacaacttttacaaacattgtgcaaaaaaaagatatacaaaaattacatttttatcttacatcctccgtgtatattcacaaaattaataacattacctttttccacaaaaaaacctaggtattcacctaggtttttaaaatcaaattatagataaacattccacttacattttactgcgcctgcattcctacaatcggaatcgtagcccacttcggcatatttttcttcacttttgccactacaatagtcatatcatcatttatataaccatcacaagagcgaatcacttcttccataatgatatcagcaatttcttgcgggtcttcggtttgcaattctttaatttttcgtttcatccacaattcatgattctccacatgctgtgctccttcaaaaatcccatcgctcatcataataagaatatcgcccgtttttaattgttcacccaccacatcaacttcaacatcttcaatgattcccatcggcaaattacttgcttcaattttcaaaatattatttgcgcgtttaacaaaactcggcgtcgatccaatctttaaaaaccttgcactcgcatcccgcaaatctaccatagctaaatctaacgtcgtaaacatctcttctgtcgttctcaaagaaagaattgaattgatagacttaattgctatttcttcatcaatgcccgattggagtattttttgtaataatttcaccgtttccttactttccatatgagccctttgcccattccccataccatcactaattgcaagtgcatatttaccaacacttaaatccatcatcgcataagagtcacccgaaacaaatccaccgccttttgcagctgtagccaatcctgtatcaagagaatacgtcttcgccgaaccaaatgatattaaactatggccatttggataagaagacttttcttcatgtttaacgacaatattttctttaaggatatccgaaagcatcggtgcaactaacttttcacattcaccatgttcattagatgcaactggaattaacatttcaatatcaatacttcctctatctaaacaataaatatcaacatgctctacttcgacaccaaaatcacggaatgcttgcataatctgttcttcctgcacttgatgattttcacgctctcgttgtatctccttagcaaaatcctccataacctttgatacacctaatagttgctccgctactattctacgattttccttcatttgttttcgtaatttttgtccctcatagaagtgatctaattcacccgctactaaatccgtcacttttttccctctcacacaatgcttgtcccactcacgaactaatttacgattatgttgcagggttccttcttccgtttcattcattatttgtttcatataatcgtacgttttatcaaaattcactacccagcattgatcctttttaaagcatgtttgacatgttttcgcagtaattgtactcaaaaacaaatctgcttctgtctctttatcttcttcctctacatacccatatacagaaaagctattagataaagcagcaaatacatttgcaaattggttgattttatttgctgtaacatcacgcatccttcttaaatattgttgttggtcttgcgaatgctcttgtgtacctggcataaatttagcaatacgatccaaaacaagcttcggtgttaataagaagataacaatcgctacacctgactcaattaaagttgttacaatatttgtctgtttgtccacatataatgtaattaagcttgtcccaattaataaacctaaactaacacctaaacgcttcccttcttttaacaatccaccaagcaatccagagaaagcaagaaggctaagctgagacaagctagacacatttgctaaacttaatattagtcctgttacaacccctactgtggatcctgtggcagcacctgcaataaatgcaaatactagcactaaataccttgtaaaaatatgttgaatagaagcatcatatacaaaccaatctgttgtacccgttaaaacagatgctagtaatataatcaaacaaacaatttcttccgtctctaatgcctgttgttttcctttcctttccactaaaagcgggacgctttgtaaaaatatcatagttaatacgaaactaagcccagcctcaatggtactaacgagtaaatcgtacatggtgacagtttgttgcgcaaaatatacaacaactaagtgtgcggttaatgcggagataaatacttgaaatggaacaagtccaacagttttacgtgtaaatcgactaaagaagatattataaatgaagaaggtaaagatagatgcaaaggtaaaaaacaaattatctatcgataccgaaagagctcctcccattagagctaaaaatgctagcggcatcttatcccgcttcataacataaacagcagcaaaaaatggcagtgcaaacggtaaaatatttgttaatatatatgctcgtcccaaaagaaaaccaataacaacaataataaatccccatctaaagaaaacttgctcaaatttcattcgcaacttactcgtccactttattcctccaagctgactctcattcattgccaatgcacttgtattcatagtattccttcctgctttaggcatatttttaacaccacctgcatagtttaattactgtcattataaaagatgattgttggtttttttgtcaaaacaacagttttcacttttataatcgttcgactttttattcgaaataactctacagatatacacggtatgtaagttatttttgagattttaattaaatattcagaaaatatagggtgattttgtagaagtgttgtatatcttaatttatttaacaaaaaaagatcatgcaaatttgcatgatctttttagatgacccgtacgggattcgaacccgtgttaccgccgtgaaagggcggtgtcttaaccacttgaccaacgggccgttaaattaaatatagcggcggaggggatcgaacccccgacctcacgggtatgaaccgtacgctctagccagctgagctacaccgccatgtcgtcttatttaacggacaattagtatcttacatcagatactaattaaagtcaacacatctcaaaaacttttttaaaaatatttttaacatataaaaaagcaccctgagccatcactctgggtacctctctatatgttaaaaactaaacgtccttattatccgcgacgcgcgccacggccaccacgtttagactctgtgttacgctttaaagaagttaaacgatcttcgctatcttttaagaagcgtgccatcttttgctcaaatgtttctttcggagctcggtcgttaccgccaccgcgattatctctgttgaaagagcgattattacgttgtggacgtccagaacgttgttgatcaccaccgcgttggtattcaccgcgtggacgatctccttctgttttttcacgttctttcgcttttttgatagataaaccaatctttccatctttttcaacattaataacttttacttctacttggtcgcccacttttaagtgatcgttaatatcttttacatagttatcagcaacttcactaatatgaacaagacccgttaagccctctggcagctccacaaaagccccaaaatttgtaatacctgttactttaccctgtaacttgctgcctacctcgattgacataaaaaaaatgctcctccttagtggttaaaaagtcaaattttactttattatatataatcctaaaatatagtgtcaataagacatactctacttagaaacaggaaaaattatctcccctttaccagagaagaaataatcccttctagcaatctttaatacgtactcttcatcatttaacttttgaacttcgtcttttagacttttttctttattcgttaatgaatccagttcttttttcatgtccttaacttttgcttcttttgctttaatggaactgttttgttgataaaacgttacactaatactcgcaataattgtaaaagtaaagacaagaaaaaccgctaaacggcgataaagtcgcttcctgttctcatccgtttgtattatatgctctttaacaggatttggactctgtttttcgattgttctttgtctcagttccctcatttccgaggtccccctaacttcttttttatatgctcccatagttggaagatatgtcccttcaattttgctatatattgcaggaaccctatatgtttcactataaaaagtttaacacgattagggagaagtttccatatgagcgaagcaataaatcgaacaggccagaaaaaaactttccatatgaaaagtaatatccaaatcaccattttccataacacatgtccaattgaaagcagtatacgaaataagaataatataaatgcaataaatagctgcgctataataataacaggttttatcatgagtagctgtataattcgaacaaaaaaatatgttgtttgcataaaaatatagatgagaaaatttaacagcttcatgtatagtgccttcagtaagctttgatatgccgcaaaaccacataataatgccaaaaacacatatatacgtagctcagcttcatttacgagaagcaatacataaaagacggataatgcttggacaatccaaaataatatatcatgtataaatacaagccaacgtttacgttcttggcgctttaaaaaacgttgatatgtatctaaagacgctccaatccaagcacccattccaatcattgaaagcattgtatacaactgaattgttaagctcatttaaacaacttactaaagaaacctttagttttttccccttgattttcatcaatatacagcatctcattaactttccctttaatcgacacaatacctttttccacatctaaatttttcatttgtaaattttgaccacgaattgttaaaaaacccattacggtctctagtaaaaactcttcgctatcaaaactctctacctgcttcacaccggtaatatcaattatacgcctgccacgcataataatgtcatgctctacagaaacattttgttgattagaagacgtaggtgagtaaccattattcacgtaaatccccccataggtttttactagctaatagtaatgtatgaggggataaatgattttagaacaagccttcttccgcttttactttttcttcacgaactaagctatacatatttgctgcatcttcttttttagttgtttcttttaattcatttattttcacagtcactattttttgaccaaaacgaattgttaattcgtcagctactttcacatcagaacttgcttttgccacttgaccattaatagatattcttccttgatcagctacttctttcgctaatgttcttcttttaattaaacgtgatacttttaaaaacttatctagacgcatatcaaatccccctattaacgctctgtctgtttcgcttcttcccataaaacatctaactgttctaatgataaatctttcatctctttattcatttcagctacttttgcctccatgtataaaaaacgaccagtaaatttctcattagttgaacgtaacgcctcttctggatctattttgtaatgacgagctatattaacaaatgcaaatagtaaatcaccaaactcacccagcatctttttctcatccatatttgtaacctcttgttggaactcttgccattcttccaaagctttctctatcatcggttgcacatcaacccaatcaaatccaaccttaccagctttcttctgaatttcataggcgcgtagtaactgcggcaaacttttgggaacgccatttaaaacagattctttcacgaatcctttttcttgttttttaatttcttcccaatttgcaatcacttcatcagcgctgtttacatccgtatttccaaacacatgcggatggcgacgaaccattttctcagatagagttcgaatgatatcatctatagagaaccaaccttcatcttctccgatttgagcatgaagcataacttgtaataatatatcacctaattcttctactaagtgatcatcatcctcttcatcgattgcttccaacacttcataagcttcctcaattaaatatttctttaatgattgatgtgtttgctttttatcccacggacaaccatttggaccacgaagttccgcaataatttctctaagaacatcaaactgttgatacaaggacgcacgctcctgaactggcggcacgtacacactcgttaaattattcaattccgtttcatgatctaacatgtacaacggtaccttctttacttgttcaaatgaagttcctgcagctgttacgatatacacttcataatcatctggtaacatctccattaatgttaatttcacatcagatgcaacgaatgcatcatatacttggcaaaagattaaatgttgacgcagttctaattgccctctttcaaatgatgtagcatcaagtaattggaatccttcaatcggatcaatctttagacttgcaaacataggatcaaggaaactttgtccaccctcaattcgcacttcaacatttgaaacttctcctttttccaacagtagctgaactgttctttctgctacaagtggatgcccgggaacagcatagataatttctgtaccttcagcttgttctagcaatttattcgcaattgtttcatatacaatttcaaacgtatcatgtgcttcatatacagcatcaaaagacgtatattgtacgccttctttctccaattcttctataactggatgttctttcgttctaacaaacagatggtctgcttcttttatttttcgatatacacccatcgttagctgatctaattcaccagctcctaaacctaaaatagtaatgattccactcacaaccagtcacctctatccactcttcttcaatgaaccttcttttttctcttgtttcataacggttcctaattctttttttgtaaatacacgtaatttcaaaataaaaaacatatatgtcaatccgccaatggctacacctaacaacgcttcaagtgtcgcgcttcctctatgttccatatcaattactaatccagacatctgtaacacacgtgtgaacatcattaatacaaatcccatacagataccactaattactatccctaacatatttcgcttattgataagtgaccctgatacagctctcgtaagcaacaaagtatttagtccagagattataattaacgcacataaagtcgcaaaggctgcacctttcacaccaaaataaggcatgaatatataatttaacgctaactttaagcaacctccaaatacaacaaataatgctggcttaaacgtttgccccaatccttgtaaaatagaagctgtcgtaattgacaatgaactaaataaaatagataacgataaaatagataaaacatctgatccatcactgttttcaaacaacataatattcgtaggttgaataatacaagttagtccaatagctgctgcaagtccaataacacatgttattttcactgctaactttaccttttcttgaataaaggaaagatctcctctttccttcgccgctgtaataatcggaataagtgacaacgagaaagaagtcgtcacaacagtacctaattgcattagcggaatacttctatcataaacaccctttaatacctttgcattttcagcctgttctcccgcaccaataagtaagctgtaaaaggacactgaatcagccatctgtataaaaataagcactaaattactaacacaaatcgctaacccctgccaaaaaaggattttaactatcttccttttacccttaattctcgctgcacttttgaagaatatagaacgaaaatcttgacgcatatacaatataagtacaataatcccaataagaccacccgcaattgagcctaacatagctcctgcaccaactgtatataaatcaaatccgtgagcaattaggaatagcgataaaaatacaataatagaaactcgaattgtttgttctattacttgcgaaacagccgttggcatcatattattaaatccttgaaaataccctcttgctacagacaaaaatggcatcaataagaatgaaaatgaaataacacgtagtaacttatctaagtgtatatcgcccatagctaccgcaattgtttcggccccaaaaaacaatgtaaagaagcctataaaaccaattcctaataagaaccaaaaagatacacaaataatttcttctgcttctttttgttttccccgctctaatcgttctgcaaccattttcgaaatgataacaggaaatccataagtagctaaaattaaacaaaatccataaaacgggtaaatttgttggtaaatataaaacccaatatcccccgctatattttgatatggaatacggtaaaaagcgcttaatacttttgtaacgaaacttgcaatcgttaatataatagccccacgccaaaaggcttgatacttcttcgcttccatacaagaaaactcctttttctattctcacctctcgtattatatcataaagaaaagaacaaactcccttcccaacacgggtaataatgagttcctacacgttaaaaatattcaacgaaaaaaggtagcaaagtgctaccttcattcaatatacatatatctccaaataattgatttctcaaaaagaaagatcataattaggaaagattgctacttctaaaatcaatatacccttactgttccatttgtttcgctaagaaactggcagcagtattaaccgctttatgctcgatctcgcttataatagcttcttttgaaaaaataatgacggctccaatcggatctccgtttgcaacaattggtccaactgtataagaatgaaccttttctgttacaccatcaataatggaaatatcactttcatccgtcataataacagactttcgttcttccatcgttttttcaattaaatcgccaacacttttatttaagtattcttttttcgatacgcctgatactgcgatgatagaatctcgatcacacacaagcacattatgtcctaagctgtcatataaagcatcagcatattcttttgcaaaatcacctagctcactaattggagaatacttctttaaaattacctctccatcgcgatcaacaaatatttctagtgggtctccttctcgaatacgtaaagttctacgaatttccttcgggattacgaccctgcctaaatcatcaattcgacgtacgattccagttgctttcattctaatgctgcctcactttctactgatgatcaaagtggtgaatttacctgttcatgtaaaaatcaccaactgttagatatagtattttacacattagttcttctatgcacgtcgaattgtatttttttatcttattttaggcatttattacttctttttttacatctggtaagccttttaataaattttcagcaatcgttaaccacttcgatgtctctaagccatttgttttcataacaattttcaattgtgatccttccattcctaaaccaatcatacgtccaaaactatttccgagcatgaataattttccaccatcaatattttgacttgcttgttcagaaaacaggaatgttacttcaaatttattctgcttaattaattcaatttgttctttcattgccaacactttaatatttgcaatttgtaataaataaccaacttcttgtggataatcgccaaatctatcgatcatttcttcctgcaattcttcaatatcctcaattgcagaaacacctctaaattgtttatacatcataattttttgcttactatctgaaatataagcatctggtaagtatgcatctacctctaagtcaatttcaacattaactatattttcagccccatctgttcctctacgctgttcaattgcatcttttaacatttgagaatatagatcaaatccgacagaatcaataaatccatgctgttctgcccctaacaaattacctgctccacgaatagataaatctctcatcgcaattttgaaaccagatccaagttccgtgaactctttaattgcttgtagacgcttctctgcaacctctgacagcactttgtcacgtttatatgcaaagtatgcatatgcaacacgattagaacgtccaacacgcccacgaagctgatacaactgtgataatcccatacgatctgcatcaaatacaattaacgtatttacattcggaatatctacacccgtctcaataattgttgtacttacaagaacatcatgctgtccttctaaaaatgatagcataacagactctaattcgctttcgttcattttcccatgtgcgtaggttacgcgggcatctggaactaacatcgaaatttcatctgcttttctttcaatatcctctacacggttatataggaagtaaacttgaccacctcttgcaagctctcgctctatcgcctctcgcattaacgctggattatactcgactacatacgtttggactgggaaacgattttctggtggtgtctcaataacagataagtcgcgcacaccaagcatagacatatgaagcgtccgcggaatcggagttgccgttaatgttaatacgtcaacattcgccttcaattgtttaattttttctttatgtgtcacaccaaatctttgttcttcatcaataataagaagccctaaatctttataagtaacatctttagataaaatacgatgtgttccgattacaatatctactgttccatcctttaagcccttaattgtttcattttgttgtttcctcgtacggaatctacttaataagcctatattgattggataatcttgaaaacgctctcgaattgtttcatagtgttgctgcgcaagaatcgttgtcggtactaaaattgcaacttgtttttcatccataatcgctttaaatgccgcacgaatagccacttcagtcttcccataccctacatcaccacaaaggagcctatccatcgggcgtccgcgttccatatcttttttaatctcgtcaatagaacgtaactgatcctctgtctcttggtatgggaaagatgattcgaactcttgttgttctgccgtatctggcgtatatgcatagccttttgaagcttcgcgctcagcatatagtttaattaggtcatccgcaatgtcttgtacagatttttcaactttcgttttaacctttttccaatcattaccacctaatttgtaaactttcggatccttaccttcagatcctacatatttttgaacttgatcaatttgttcaattggaacgtatagcttatcattaccttgatatttaatatttaaataatctttatgaacaccattaatctctaatgtctcaatacctaaaaatttacctataccatgatttacatgaactacataatctccaacttttaattccgaataacttttaatacgttcagcattcgatagcttttgtttacgttgtgattttttaactttcttatgaaaaagctccttttcagtaatgacaacaagcttttgcatcggcatttcaaatcctgcatgtaaatcacctacagcaatttgtaaccttccaggcaataaaatatctgtaccttctacaatatctgcctcaatatcataatcacttaaaatatgttgtaattttttcacacgttcatcatctgttccgagtacaacagtcgtaaaatgcccttcattccatctatcaatttctgtttttaacaaattcatctgtccatggaaatcttgcattgttttacatgttacattaacaatattttgcggatgtgtgtgtgcgatatgacgcaagaataacgttaaatatacaaaacttctttttttatgatgaagaaacccctcgaatgggtgagagaaagataaatcttgaataattgttccttcaccaagaagtgatatataccattccgcctcttctgtttcaagatgtgatgctgtttcttgaatacgggaaatctcatctaaaattacaacaccatcttctggtaaataatctatcagactagcaggttctttatagaaaatagataagtatttaaacatctgttctatactttgcccgtttttcaacatctcaatttcatgacttaccgtctcaagcactttagtctttagtttatcatcagaaagtttttgcatcgtcttagtcaagccttcttcaagatgctgaattcctgattttaattcttcctgtgaaaataaaaactctgttgccggaccaaacctaacgttttcttttttaccttgagaacgctgttcatccacatcaaataatcgaatagaatcgacttctgtatcaaagaattcaatacgaaatggtagttcttcagttaaaggataaatatctaatattcccccacgcaaactgaactcccctggagcttctaccatcgacttacgttcatagccaatatgatgtaaagtatgcaagagcgcatctaaatcaatctcttgccctagattgatttcaacttgcttttgcttccacaattcttttattggtaaaaatctacgcaatcctgccactggcgctacaatgattccattctctcccgcagccaagcgatttaacacttctatacgttgcgccttcaattctggacttgcaactccaatttccgatgctatcagttcattcactggatataaccacacatctttttcaccaagtaacgccactaaatcttcatgtactttttgtgcttggtataagttatgtgtcacgattaattgtgatttttttgtttttttatataaagccgccattaataatgaacgagaagacgttgccatccctgatataagttgttcttttaacccatcttctaacccattaataaccgattgtatctcttcatttttataaaattgctctaataaacctatcatttttaaaactcctctcaacataaagagcaagtcattctattttatgcaaatattttggaaaaggaaaacagaaaaatgctttggacatgccaaagcgacaacattttattgcagaaatttttcatactcataatactcaggataagatgcgagcgtttcttgacacgattcacaaatcgtttttatatatatatttccattctcatgaaaatgaatcatttctactacttcttgctccgttagttgaaataaaacgtcgctatatactttttctgcgttaatggagcctacattacctccgcagtgtctgcaataataatacccttccatactagcctcctaaaaattcaattactactagtatgggtaaaacaaaagagaaatattcccaatctcatttttaactattgaaagtattcatgatttgaagaaaaggcttatttagccactcttcacatgcatccgctgctttttcaatagaatggttaacatccggaatctcttcagatgtaaagcgtcctaatacataatcgactaccttcattccatttttcgggcgatcaattcccatacggatacgttgaaattcttgtgttcctaagtgcgaaatcgttgactttacaccattatgtccaccagcactacctttcatgcgaagacgcaatttacctacaggaatgtctaaatcgtcgtacataacaacgaagtcctcaacatcaattttataataatccataagtggacgaatactttccccagataaattcatgtatgttagcggctttaataagattaccttttctccattaacaaaccctgcaccaaatacacctttaaatttttgttcattcaaagaaatgttccaacgcttcgcaagttcatcaatggccataaatccaatattatgccttgttaattcatattctctacctgggttcccaagtcctactatcaatttcattcttgtaccactactttcttttttcgatacgaaaagacgtaaccaattttggttacgtctcattctatccaattaattgaataatacactcacagattcttcttcgtatacacgaatgattgcttctccgattaatggagcaactgaaagttcatgtactttgtcgattttcttctcttctggtaatacgatagagttcgttacaactaactctttaatgtttgaattttgaatacgctcaattgctggaccagataatactgggtgtgtacagcaagcatatacttcagaagcaccgttctcaacaagagcgtttgctgctaatgtaattgtaccagctgtatcaatgatgtcatcaattaaaatcgctgttttgccttcaatattaccgataatgttcattacctctgaaacgttcgggcgaggacgacgcttatcaataatagcgattggcgcttttagacgatctgccatttttctcgcacgagttacaccaccatgatcaggagacacgattacgatatctttaagaccttttgtttcaaagtaatcagaaagaatcggtacacccattaagtggtcgattgggatatcaaagaacccttgaatttgtggagcatgtaaatctagagtgattacacgagttgcacctgctgtttcaagcaagtttgctacaagtttcgatgtaattggttcacgagaacgcgctttacggtcttgacgcgcataaccatagtaaggaataacaatattaattgttttcgcagatgcacgttttaatgcatcgatcataataagtaattccatgatatgttcgtttactgggaagcttgtagattgaataatgaatacatcgcaaccacggatactttcttcaatgttaatttgaacttctccatcactaaaacgatcaacagaacattttcctagtcctactccaatatgctttgcaatctgctcagcaagttccttattagagtttaaagagaatactttcaaattagaatttagatattgagtcgacatctagattaaccctccacattattatgattttttcttattcagcaattgatcaacatagtcttctttgttaacttgacgtgcacgtgctaccgataatgcttttgatggaacattctctgtaattgtagagcctgccgccacataagcaccatcttcaactgttactggagcaacaaggtttgaattacatccaataaataccccattaccaatcacagttttgaatttattcttaccgtcatagttcaccgtaattgaaccacaaccaagattcacgtcttctccaacttgtgcatccccgatataactcaagtgtgaagctttacttctattaccaaagacagtttttttgatttccacgaagtttccaacgcgtacttcgtctccaataactgaacctgggcgaatatgtgcaaatggaccaaccgatacttctgtaccaagcttactatcatgtacagtagattgtcgaattgtcgtacgatctccaatttcactatcgcgaattactgtatgcggtccaatttcacaatcagaaccaattacagtgttcccctcaataattgttcctggatgaagaactgtatcgctaccgataattgcatcagcagaaatataagtgttacttggatcaataattgtaacaccatttaccatgttctttcggttgatacggtttttcataataatttccgcttgcgatagagcgactctgtcgttaacacctaacgtttcatcgaactgctctgtttgataagctgatacgatatgaccttcattttttaaaatctcaataacatctggaaggtaatattcaccttgcacgttatcatttgaaactttagaaagtgaagcaaataaagccttattatcaaaacaatacgtacctgtattgatttctttaatagctaattctttctcatttgcatctttatgctcaacaatcttttcaacatgaccattctcattacgaacaatacggccatatccagcaggctcttctatgtatgctgttagcaccgtcgccattgctcctgcttctttatgttgctgaagtaatgcttccattgtttcagcagttattagaggcgtatcaccacaaataactaaagttgttccttcttcatttgcaagtacacttgcagcttgatctacagcatgtgctgtaccaagttgttctgcttgtaatgcaaattcacttacgttccctagctgttcttgtaccatttcagcaccatgtccaacaaccgttacaagtttctgcaatcctaattgagatacttgatcgactacgtgttgtaccataggttttccacatacaggatgcagcactttgtatagcttagacttcatacgtgtgcctttacctgcagctagaatcactgcaaatctgtttgacatatagaccctccatcgcaacctatttatccattaaagatattatcctaaatcatcatatatttcaagaaacacattttaactattaaattttaccataattcttataagatgttttactctttagtatcttttttaagaaataagctatactatttaaaatgattttgaaaaaattagtagtttcttctttttatgttaataaattatacagtttccaaatataaagcaaaaaaaacaaacccctgtaaatgcttacaggagtttgctacaaaattataaggctttttgtcaaaagcccttttcattcgaattttacgaagcacctgcttcttcaaactcaacctcttctaactcgcctaaacgatgatactctgttaaaaccgcatcttgaattttagagcgtgtaccagaattaattggatgtgcaatgtcacggaactctccatctggagtacgtttacttggcattgctacaaataatccattattaccatcaattacacgaatatcatgaacaacaaattcatggtctagagtaatagaggcaattgctctcatgcggccttctgtgtttacgcggcgtaatcttacgtcagtcacttccatcttgtgttcaccacccttttctaaataagcgatatatttgtataaattccacaaattttctattttccctttaattttttaaaaatttttaagataaaaatttttaaagtagttgaatatagagattagtggaggttatcgcttacaaaaggttacttaactagggcgattacttcaatttcaacggaaacatctttcggtaattttgctacttgcacacaagatcgagctggtttatgagtagagaaataagagctatacacttcattcacagcattaaaatcatccatgtcctttaaaaatactgttgtttttacgactgtatcaaatgaagcacctgcttcctctaataccgcttgtaaattttgaaatacttgttctgtttgtactgttacatctcctgttacaagctccccatttgccatcaatggaatttgtcctgagctatagaacatgttatttacaataatcccctgtgaataaggtccaattgcttgtggtgccttgcttgtttgaacaactttcatacttttcacccttttattatttattttactctttaaaaatagtgtacgaaaggcagtttgtccatctattttataatctataaataaaataaaaaagatagagctatctgctctatcttttattccgcctctacaagcccttcatcaaatggtgcaagagaataattccctttttccacttgaatcgttttttctttcacatcaacttccgatagacgaattaatgatacaaaattattaattagtcgttcttcaatatctgtggattctactaatacaccaataccaacaacattagccttgaattcttctagcatactcatcataccttgaattgttccgccagctttcatgaagtcatcaataattaaaacattcgacccttctggaagactgcgttttgctaacgtcattgtttgaattcgtttagaagaacccgacacatagttaatactaacagtcggaccttctgttaccttattatctttccttgcaattacaactggtacatctaagtaatttgccactgcataagcaagtggaatccccttcgttgccaccgtcataactgcatcaattggttgcctagcaaaaacagaagcaaacaaacgacctgcgccattaatatggcgaggattactcaataaatctgtcatgtataagtaaccgccaggcaaaatacgatctgggttttcaaataagccacaaagctcatcaataattagatctgcctcttcttcacttatatacggtatatatttcactcctcctgctgctcctggtatcgtttgcaatgtgccgaccccttgttgttcaaacgtttgcttaataataactaaatcttcactaatggaagacttagccgattgatacctttcagcaaaaaaagtgagagatactagctgacgagggttttgtagcaagtaataagtcatatcgactaatcttgtacttcttctaattttcatactctcacctcaaatcacgaatattctaaacaaatcataacgtattatacgtctttattcaagcgtttctcgctctcctaataaacgtaccgcatagacttgttcacaaaatccttttaatccgttataaatgcgatgcattcgtgaatcatggtgtacaagtccaaatacagttggaccacttccactcattaatacagcatccgctccaaatcgcttcatctgtgatttaatacgggcaacttcaggatgcattccaaatgttacatcttctaaaacgttaccaacagtatcacaaattcctttataatcaccagaatttatgacatcaaccattttatctacatttggatgtgtaactcgatttaactttaaatttccatacacatcagcagtagatacacctatatgtggtttcgctaaaataacccaacaagaaggcggagtctttatatgctcaattttctctcctcttccagtggcaattgctgtgcctccgtatacacagaacgatacatctgatccaatttctgcaccaagctctgctaactcatcaattgtaagctctaaattccataatttattaagaccacgtaatgtcgctgctgcatcactacttccacctgctaatccagctgctactggaatcgttttttcaatagtaatagatacacctttttttacattaaacttctcttttaataatttcgctgcctgataagctaaatttcgttggtcgtctgggacataccgattatgggataaaatttcaatacggtcttctgctaattccgttagttctagacgatctgctaaatcaatggttgtcataatcattttcacttcatgatatccgtcttgtctttttcccagtacatctaacgacagattaatctttgctggtgctttcactagtagcttcaatctattcacccactctatgtactcaatcttttatcgtttattttaccataaatttatagtaagacgatgacacttccctaattataacgaaaagcattcagaatgaaactacttatgtaaaatgatggcaccttttagagtacaaaaagccgaggaatgtctcctcggctaccgtagcacagaaagtatcttacaactactggtttcgtttcattaattgctgttctgcaatttctatagcacgtttcaccatgttaccagcatctttcgcacgaattccgccccatccttctttctgaacaacatcataaaagccaagctcttttgctagctcttctttaaattggtttgacatgacacctcttcgtctactcaatgcagagtccctccttattttgctacggtatagttagtatgcaaaataatatagcttttcatttatgggaatatatgtaatgatatatggattataaaatgacctcattatgagggtctccataaaatgttaactctactgtctctgttaaaacatctgcataactataagatacacgttgcaacgcatcttcttgttgatccaattgtacaacaaaaacggaacggtatgtttctgctagtacacctgattgctccacagtttttcttcttccactatttgcttttaacataagtcgctgtccaagatggtgatctaattcgcttttaatttcatctaaacgttttgacatatacttcgctacacctcgctgtaatttagattgaacacttaaagcacgatatatctatcctaattattaaccgcgattcacagctaatatcatcctgcgtttgaatagatagaagaaatactatattgtaaaagtatcattacgtagtctttacgttcttacctctttttatccaaattcatttaaatccttccatacaaaaagcaagatacatatgtatcctgcttactcttcgtaatgttgaaaaggtaatcccgttcgtaaaatccctctcgtttcaattccacctagtcccttttcaccagtaattgtattacgtacgacatcccatacattgactctctccataaatgaagtaaaactaattttaccaactacatatacaggatctagtgcatgaatattaattctagatggtgaactagcgaaattggcccctgcacgaattagtgcctcaaaatgtgattgacatgccccagcaaaaataacaagttgatccaatgatggatatttttttcgcacttcacgaacagcctgtacaaaatgccttgaatgcctatatgccgctaaatctcccttcactccttttgattttgtatatgcatcatgccctgtaataacgagaatgtctgggcgaaagtgatctattaagtctactactttttcatgcatcaccgtttctttacaatgaataccttgaacaggaacgccaattttattatataaatctaagcacttgcgcaaatataaagggtctccatctatatgcaatacacgtcccggcatttgaaaataatttacctcacttgtgtatccaccagttgaagtatgttcatgcctttgtttcatcagtacataatcttgttgaaacaaacgatacgtgcgctccattgtttctttctcacgcttcaccctttttttatgttctctttgatctatactaattaaatcttcaagtggcgcatccgccaccagtctaatttcctctccaaacaatatagctatctcgccttttatttctataatacgaaaaagaatatccctcttatgagaatatcgttccactaattctccaacatgtaaaaccattctcctacctccaaactcattaggccatcttacctgtttttaaagtatgaatttagagagcgaaaggtgacaaaagggacagttcaacttgaactgtccctttcatattcttatgataatttatgaagaactaatgcattacttaatgttgcaaactcttcaatagatagcgtttcgcctcttcgctttggatcaattcctacttctgttaaaattcgatccaataactccttatctttcgggaaaccatttaaattatttgataaattattcattaaagttttacggcgctgtgcgaaacttgctcgtactacttcaaagaaaaacgtttcatctgtcacctctacaaccggtttaggacgctttagaaggcggataattgcagaatcaacgtttggctgtggtacaaacactgtacgcggtacagtcataactgtttcaacctctgtatagtactgaatggcaatcgataaagaaccatactcttttgttccaggtttagcagctaaacgatctccaacttctttttgcatcataacaacaaatccacgaactggtaacttttcttcaagcaatttaaataaaattggcgttgtaatatagtacggtaagttagctactaccattacatcttgcccttcttcaaattgctcattaaatacttcatgtacatctgcttttagtacgtctttattaataactgtaacattaccatatggcgctaacgtctcatctaaaattggtaatagtctttgatcaatttcaaaagccactacttttttagcacgcttcgctaattgctctgttaatgcaccaatacctggtccaatttcaattgcaccactttctgaaccaatttctgcatgatcgacaatacgatttaatacatttgtatcaattaaaaagttttgtcctaaactttttttgaatgaaaatccatacttttcaacaatgtcttttgtacgatttggcgttgcgatatccttcattttttttcctcctgtattacttgcttataagcttctgcaaatgattcctttgaaacttgaaacatctgtaatcgtttatgtaactgttttgcatttgtataaccaatctttaataacttacccattctttctctgcggctctttgccatttctccgcccactaagcctgcatcgactaaatcactccaactaatttcacttgtgtaagcttccatttcttcatgtatattctctagagcacggcgaatcgactcattagaagcatgttcaatcccaacaccctttttccttttagcaagcgcttcttccttcggtaaaaaagcatgcttacagccaggaaccttgtcagaaataatttttcgaatacgctctccaggataatccggatctgtgaaaataataacgccccttttttgctgcgctaatttaacttgctcaataacatgatcaccgattgctgaaccgttcgtttcaattgtatccgcatcaacagcacgcttaatcgcaactgtatcatctttaccttctacaacgataatctcttttattttcatgcttgcctccacactcatttcgtctctacttagtaaaacaaaaaaatgacgacttttccattattattttccccattcttatattttaaaaaatagaatagaaaaatctttgttctctgtccttattgtaacacttcatcattcacatttattttcttgattacttctactagtttttctcaaaataaaaaagaacaggtttcccccgttctttttattcaacaccaaataaaacttttgcatttttagttgtcatttctgctacttcctcataagaaattccttttaaattcgcaatttcttctgctacgagttttacataactcggttcatttcgtttcccgcgaaatggatgcggcgttaaatagggacaatccgtctctattaacaatttctctaatggaatctccgtagcaacttctttcggtttcttagcgtttttaaatgtaactggtccacctaacgaaattaaaaagttcatatcaacacatcgctctgctacttctacgctaccgctaaagcaatgcataatgcctcctacttcagctgcattctcttcttctagaatatcgacaatatcttgagttgcatcgcggttatgtataataatcggcaaatttacttttttcgctaatgcaatttgtttacgaaatacttctttctgtatttcttttggagacttatcccagtgataatctaagcccatttctccaagtgcaacgactttaggatgagaagcaagttcttctaaccaagctaaatgttcttctgtcatgtcgattgcatcaactggatgccagccaaccgcagcgtaaataaaatcataggcttcagctaattccatcgccttttttatcgttacttcatcaaaaccaacaacaactgtataagtaactcccgcttctttcattcgggcaataacctcttgcaaatcttcttcgaattgctctgcattcaaatgtgaatgtgtatcaaacaacataatacataactccttttatattgaaatcaagtttattctacaaaaataagttctttaataacttaacgataacaatactacaatcttaatgcaaaaatagagagtgtaaaaagaaaaaagacgcttcacacatgttacacgtgaaacatctcttttcttgtcttaattacttgatttttgtaccatttggtagattttggtcaattgatgctaatgacaatacgccattctcttcacccgctaaaatcataccttgcgataattcaccgcgtaattttacaggttttaagtttgttacacaaataacctttttaccttttaagtcttccggcgaatagaattttgcaattccagaaacaacttgacgcttttctgtgcctaagtctagttgaatttttaacaacttgtctgcttttttcacaggttcagcagatagtacttcagctacgcgtaattctactttaaagaaatcatcaattgtaatttcttctgccttcggttcttcttcttttttctcttctactttaggagcagagcttttcatttgttctttaatgtactctacttccacttccatttctaaacgagggaaaattgggtttcctttttctacttttgttccagctggaatgcagccaattgtagatagactttcccaagatttatgagcttcatcagtaaggccaagctgagcaaacatcttgcttggtgctactgttaagaatggcataagcataatacctgtttgacgaagtacttctgctaaatgagccattacagaagctaacttttcacgatcattctcatcttttgctaatacccatggttgtgtttcatcaatatatttattcgtacgactaactagttgccaaatagatcctaacgctacagagaactccatattctccattgcttcttctacttttttcaaagtatcttgtgcaaacgctactaacgtttcatcaaattccgtcacattttctttaaatgcagggatttctccgttaaaatacttatcaatcatagctactgtacgatttaataaattacctaagtcatttgctaagtcgaaattaatacgctccacaaatccttctggtgtgaatacaccatcagatccaaatggaacttcacgaagtaggtaataacgtaatgcatctaatccgtaacgatcgattaatgtaactggatctactacgtttccttttgacttactcatctttccatccttcattaaaatccagccatgagcaaagactttcttcggaagaggtaaatctaatgccattaaaattatcggccaataaattgtatggaaacgaacaatttctttcccaactaaatgcacatctgcaggccagaattttttatatttctcttcatttgctgttccataacctaacgccgtaatataattagatagtgcgtcaacccatacgtaaataacatgttttgggttaccaggaacacgaactccccagtcaaatgaagtacgagaaaccgctaaatcttctaatcctggtttaataaaattattaatcatttcatttttacgagactccggctgaatgaaatgtggattatcttcatagaactttaatagtctgtcgacatatttacccattctaaagaaataagattcttcacgaacaagttctacatcatgaccactatctgggctttttcctccaactactttgtcgccttccataattggatctactaattgatgctctgtatagaacgtctcatcttgtacagaataccaaccttcatattcatcaagataaatgtcaccttgatctactaattgcttaaagattttttcgacaacatctttatgacgatcttcagttgtacgaataaaatcatcataagaaatatccatcttctcccaaagccctttaattcctgcaacaatgttatcaacatatgcctgtggcgtaatatttaactcttctgctttcttttggatcttctgtccatgctcatcagttcctgttaaataatgcacattataaccttgcatacgcttatatcgtgccatcgcatctcctgctactgtcgtataagcatgtccaatgtgtaattttccacttggataataaattggggtagtaatataaaaggacttattttcctctgtcattgttttggacctcccgaataacctcatatgtatttataaacagtatatcaaaaactcatatataaagtgaaactttaatcagtagggtttttgttcctccctactaattattagcccacattaattgggcttttacgagcagcccaaatctaacttatcttctttacgccaacctaattttaaatttaggtcttaatgctcgatatctttatcatctattgctcatatttcacaaaaatatacaatctccacttttaatttattattttttcagaaaataatgtaaataattgtggaatttcctctcaatctattatatataagaaataagaaatctataaatctttttaaaaaatatagaatttaagaattgacggaaatgtaaatgattggtatcatatgtccatagggtattttgtcgaaaaatgacgaatctaaaaatagactcgaaacttataaactatttatttaggaggaaaaaaattatgaaatctactggtattgttcgtaaagttgatgaattaggtcgtgtagtaattccaatcgaattacgccgtactttaggtattgcagaaaaggacgctcttgaaatctatgttgatgacgaaaaaatcatcttaaagaaatataaaccaaacatgacttgccaagtaactggtgaagtatctgacggtaacctttctttagctgaaggtaaaatcatcttaagcaaagaaggcgctgagcaaatcttaaacgaacttcaagattatatcgaaacagcaaaataagcttctcaattatgagaagcttattttttatcgacatgatagatttgatatacatctcttttcgacaaatctcgatctttagcgactgttttaatcgcttcttttgaattcatacttttttcatttatataatattcaatatgatcatataccgaaagagattcccaccattgttcttctggaacaggttcttctgttgaaccagctactaaaatacaaaactcaccacgtacttcattttgcttcgtccactcaattgcttcttcgattgtccctcgaataaattcctcaaattttttagttaactctcgacataatacaatctctctatttcccaacacttcctgcatcgaaattaaagtatcgtctaaacgatgaggcgcttcataaaacatcattgtagtttgtacataacgaagcttttctaactccatctttcgttcctttttgtttctctgcaagaaaccatagaaataaaactgctttgtttcaagaccggatgcaattaatgctgtaagggctgcatttgctccaggaagcggaattacatgatattgctcagctactgcctcaacgacaatatcgtaacctggatcagaaatacacggcataccagcgtcgctaacaagtgctacattctttccatcctctaatttctctaatagtttcttcccacttacttctttattgtgctcatgataactcgtaacaggtgtttcaatttcaaaataattacaaagttttttcgtttgtctcgtatcttcagcagcaattaaatcaacttcttttaaaattcggattgcacgaaatgtcatatcttctagatttccaataggagttggtactaaatataaaactcccttttcattttgttgaaagcttttttgttgccacatagcgttctcctttttgcatatatgcctctttttgttttctcgttaattgcttaaagtaatactccgcttgcatagctgtacgcttatcatcgtgggtctctacatattttaaaacaacaggaagcctgacgcgtgtatacttagcccctttgccgctattatgagtctgaattctcttttctatatggtttgtatatccagcataataacttccatcagagcactctaccacataaaaaaagtgcttattcttctccatataaaatcgaacgtagctcctttgtatattcgttattgctctcatatacaacgagaggcggtaaaattttcaaatctgcatttccatccttaattccttcaattaacaatgtatttgcttcttttccaaccttaggataaacaaattgcacacgctttggttcaattttatatttacgcattaatgtgacaatgtctagtaatcgccctggacgatgtacaaacgctactttcccaccttgttttactaactgactacttacagatacaacatcttctaatgtacacataatttcatgacgagctatcgctaaatgttcattcatatttttctctgaagtttgaggtgtttgaaaatatggtggattacatgtaacaacatcatattgatgacgcccaagtttctctggcatatctttcaaatctccatgtatgaggtgaattctttcctccaacccattgtattgaacacttcttactcccatatcatataagcgttcttgaatttccaccccagtaatatttccttttgttcttgtacttaatagaaggggaacaaccgcgttacctgtacacaaatcaagtaaattccccttttgaattggtacccatgcaaaatctgcaagtaaaacggcatctaaagaaaaattaaatactgatgggctttgtataatcttcatgtcttgtgctaataagtaatctaaacgttcatcttcatataaattcatatactgctccttttcttacccttaacctaccctatttcatgtataaaaaattacctttccaattataattggaaaggtaatttcactttttatttaagaatgacagacagaataaacaatctccctctttacgtacacttccataatgtagattgcaaatatgaaaaccttcttgatacagtctcgctaaattgtcatagccttcaccaatatctgttttcggcttcacttctttacgtttttgagttttttgtttttctttattctgcacttcttcaaaacggtgtcgcaaattgttattttccatttttatatgctggttttcttccaacaactctgcaagatgctgttttaactctcccaactgtttatataaatgtccaatttgctcttccatactagaaaccgattcaaaaatatcttttttctccacaagcacccacctcattaatctgtggtttgactcgaaacgacccctttattcactaactcatctaacgtatattctactatccgttccttgtctactagttccacttgaattaatctttctaaaatatttaatccgataacacggccagtaccatgcggggtttgtatacgttgatctaaatcaggaagttgttcctttgctgcctcatattcatcattctcatattttaagcaacacattaagcgaccacataaaccagagatttttgcaggatttaatgataaattttgatcctttgccattttaatggatacaggttcaaaatcccctaaaaaagtagaacaacaaagcatacgaccacatggaccaataccacctagcatcttcgcttcatcacgaacaccaatttgtcttagttcaattcttgttctaaaaattgcggctaagtccttcactagttcgcggaaatcgatccgaccatccgcagtaaaatagaaaataatcttattacgatcgaatgtatactctacatctacaagtttcatatcaagattatgctctactaccttttgttgacagacttgatatgcttctttggcagcatgtttgttctcttcaacaatggtacgatcattttcatttgcaatacgaataaccttttttagcggtaatacaacgtcgttttcatcaacttgttttttggtaataactacttttccgtattcaatacctcttaccgtttctacaatgacaaactcattttcagagatatcgaactggtttggatcaaagtaatatacctttccggccttcttaaagcgaacacctactacatcatacaaaacggtcatccctcctgcaaccgcaacactaactgttcgaacacaagctgcgcatttacattagcgttgattctattttttgcctctaatatattaaagagagctgatacaatgcgcttctgagcataggaaaacgattcaaacatctctttctgatcatgaaaaacaagacgatcttcttctccaagttgaacatataataaatccttataaataaggagtaacatatctaaaccttgctgtaattgttctttctctccaaagtgttttccccatttttcttgtacaaaaaaaatagaggttttatctttttcgagcgcttcacataattttatcactaaagctcgtgcttgtgcaaaccattcatcactacataaagctaaagcttcatcaaaactatttgtaagttgagcagcaagtgtcgataaagatgctgtaatcccttcatcctgtaatcttctaattaaagattccgtaggtaacggtctaaacgtaacaacttggcaacgagataaaatcgtatttaaaatttgatgactttgttcagtaagtaaaatagcagttgtatcactacttggttcttctaaaaatttcaaaagtgtatttgccgcatttgctgtcatacgatctgcgtgctcaataatatataattttttatttgcctctaatcctgtttttgaaaactcttcttgtaaatcatgaatttgctgctttttaatagataatccgtctggttttacaatatgtaagttagggtggttacctgaatcaattcgcttacagtttgtacatacatggcagggctctaccccattccgctcagaacagaggaaactctttgccatttgaattgctgtcgcaaactttcctgtccctttccctccctctaacaagtaagcgtgggatatacgctcttttgcaatgctattcatcaacatttttacaccgatgggttgtatagcagaaagctgctcccacgtcttcgtcataatgcatacctcacttatttcattctttccttctattataacaatttatcttctataatctgaacaacttcttctataagtttttccatcggctgatcagcatttaccaatacaatacgatccgagaaacgttctacaacttgtaaatacccttcgcgcacacgtttatggaaagagatatcttccatatctagtcgatttacttcacgtcctgcatctttttcaatccgagccaaaccaacctcaggctcaatgtctagataaattgttaaactaggcatacagtcctctgttgcgaaacgatttatttcaaataccttatccatacccaatcctcttgcatagccttggtatgctaaagagctatctataaaacgatcacataacacgaggtagttctcattaagtgctggcataactttttctactaaatgttgtctgcgcgcagcagcataaagaagcgcttctgtacgtgcttccatcatcgtatattcttgtttatgtaaaatcgtcctaatgtcctcagaaattgcaataccgcctggttcccttgtcgccattaccttttgtgcttttttttcaaaatatggcaataagcttttaattaacgttgttttacctgaaccttctgggccctcaattgttacaaataatcccttcatcctaaaacctactttctatatcatacactttcatatatttcgtattaccttgaaaacgagctcctgctctctctaaatacataatttgctctttatgctctgaagtaattctctctccatacataatcaatggaattccaggtggatacggaatcaccatttccgccgctatcattccaacagcctcttctatagatactatctttgtttcatatccgtctagttgtttatacgtatacggtaaaagagagaattcacctttataagtataacgaatagattccctcttgtctttcacctcataatgttgcaatgctactcggatcatctctataaccttcatatatccctcatttacttgtaagggtaaaataaataggacattgtacggatcagccatctctgtatatataccgaccttttcaaatacagactgtaattcgtaccctgataactgacaacgagtttgtacggtgacctttaactcatcttgcaacggatattctaaaatggcgatttggggaatagaacgtaattgttccttaaatcttcgtaaaaactcaacaatttcactgtgaccttcttcttttatacgcgccattgtaaagcgtgctatatccaaggaagccataattggatacgatggactactagattgtagcatacttaaataagtagtaaccttctcttcgtctactaagtgactatttatatgtaaataggaacccattgtcattgcgggtaatgttttatgtgcagaatgaactacaatatctgcaccatatgttaatgctgactttgggaatggttctcccaagcacagatgtgccccatgtgcctcatctaccaaaacagggattttatgtgcatgtgcaaaagcgatgcttgcctctagatccatacccataccataataattaggatgcgttaaaatgagtgctttcgcatttggatacttttcaattgctttcttaataatttcgttacgaactcccaccggtacgttataagcttcatcaatccatggatctaaaaaaatgggatttgctcccgcaagttttaaagcattaataattgatttatggcaatttctttgtacaagaacaatatcatgttccccacaacaagacaaaatcattgctaagttcccgactgttgaaccattaattaaaaaatagctcctctttgtattataaacttcagccaataattgttgtgcctcatctatacattcaaacggactatgcaaatcatctagtcctgctaactcagttacatcaatagatagaatatctttaaactctcttattgcctcctgagggaagtttaaaccattcttatgacctggaacatgaaaggataacggccctctttctttaaactctattaacgcctcatataaaggcatacgattttgattcatctacatctcttccttattattcattctctatctattatacagaacaaaaaaaataataggcatatgcctatttaaaaatatgatacttctaattttcgaagctgctttaaataatgtatatatttcggatcatctgtctctgtattcaccatatccttttcacattcatagcatattaaattattataaacatatataccttcttttctttttgtctcacaaacaatacaaacttcactttgtaatttcatagccttccctccctattttagtgaacctattttatacttctaatccttaacaatttacagaaaaatatacacccatctcttatataatatgattaactcttgggcaacgtgtttgtatcacccttacttctttcccgttctttttaacaatacaaaaaaacacaaatcaaatgacttgtgtttttagttgcttggcgacgtcctactctcacagggacaaggtcccaactaccatcggcgctagagagcttaacttccgtgttcggtatgggaacgggtgtgacctctctgccatcatcaccaaactatgaaggcatattccttcaaaactagataacattgctacatattatatggttaagtcctcgatctattagtattcgtcagctccacatgtcacgccttggctttcgctttttcttcttccgttacttcttctattccttctcttttctgcttcgctaacgccgccacttttgcttttgcagccgctgctgccttcgccttggctttcgctttttcttcttccgttacttcttctattccttctcttttctgcttcgctaacgccgccacttttgcttttgcagccgctgctgccttcgccttggctttcgctttttcttcttccgttacttcttctattccttctcttttctgcttcgctaacgccgccacttttgcttttgcagccgctgctgccttcgccttggctttcgctttttcttcttccgttacttcttctattccttctcttttctgcttcgctaacgccgccacttttgcttttgcagccgctgctgccttcgccttggctttcgctttttcttcttccgttacttcttctattccttctcttttctgcttcgctaacgtcgccgcttttgcttttgcagctgctgctgccttcgccttggctttcgctttttcttcttccgtcacttcttcggttccttctcttttctgcttcgctaacgctgccgcttttgcttttgcagccgctgctgccttcgccttggcttttgctttttcttcttccgttacttcttcggttccttctcttttctgcttcgctaacgccgtcacttttgcttttgcagccgctgctgcacgtcgttttgcttcttctatagtaatatcatcgttttttggtagcgctttctctttttcttgatcttcttcctcaagctcacttatttccgcctcgtgtttcgctacaaggcgttttctcgcttcttcttttgcacgcctagctgcttcttttttcagctcctctaaatctttatttggattgctcatttattcgtcacctgcttcccggtctttgcttcgtaacgaattttttcttttaatttattgattccataaattaaagcagctggatttgggggacaaccaggaatatacacatcaactggtacaatttggtctacacctttcacaacagcatatgaatttacatacggaccacctgctgtcgcacaagatcccatcgcaataacccatttcggttcgggcatttgatcatataagcgccgaacaataggagccatcttcttcgttaccgttcccgatacaatcatgacgtccgattgccttggtgaagtccgaaaaaatgacccaaatcgatctaaatcataatgtgatgaacctactcccatcatttcaattgcacagcacgccagtccgaatgtcatcggccataaagaattgctcctcgcccatcctttcaactgttccaatgtagaaaaaaagatatttcgttctaattctgctcgctcatttggatgtaattcctcaaaatttataaccattgtaacaccttctttttccaagcatacgctaatccaactagcaacattacaacaaagatgagcatttcaattaatgcaaataaacctagcttgtcatacgcaacagcccaaggatataaaaataaagtttctacatcaaagatcacaaacaataaagcgaaaatataataacgagcatgaaaccgaatatttgcatcatgaaaaggctcaattccactctcatacgtcgtcgcctttgctgcacttggtttatttgggcgcagcatccttcctaatgtaagagccactaccggcagcaatatacctaatagcaagaaaatcaaaacgatcatataactattttcatatacacttgccattgtgaaaccctcccccctaaattaagaacaagttcacatagtaaacaatatgtcctagttgcagtaattattatttttaaatttttctaaataatgcaactattctaatcattatagcaaaattcaaattcctatgtcgatatgttgggaggcagaaacaagaattattaaaatctatctttacaacttgctataattgtgcaaaataaatataaaacttatatatgcttttcaagaaaccgtaggtgatataaatgaaaaaacaaacacatgtaagtattcttataagcattgtattgctgtctataacgcttcactatgtagcgatgccttttctatatgaatactcattttcttttcagctattaatcggaatgagtaccctattaattgatattatcgcttgtagttatttactttatttttcaaacatgaaagaagggctatctcgtttattttggatcatattatctgttggagctctctcttattttatcggtgatatagtcgttgcctatcagcgtttaattgtaaaggacttctatacgttcgttgatccatctgactttttttacttactttttttagttagctttacgtttgcctttctatacgaaatcatttataaccgagatttattagaaaaactttttatgctatgtgatatttgtattatcgttacagcccaatttactttaagttactacttacttattgaacgaactattcatatctttacaacatcctatatcgacatatttgttcaacttacctatccaatggctgatttactctttctcttaataggaatcaaccttttattcaaaccactatccttattacctaaaaaggtcggtgcacttcttggcagtgctttaattttatatgctactacagatgcgatttatgcgtatataaaatacttcataccagagtattctatgtttacagttactcctttctatcaagtaaccttagtactagtagcaatcgcctgtattctccatacaaaaaagcctgaaaaacaagaacaagtactactaacacctaaaattggtgaatcaatccgattatcattaccgtatatttcggtagtaatgcttattgttttcatattagttgaatacgtttttgcgcctattatagtaatcggacttataataactttctctttcgttctcatacgtcatagtttagttcgaaaacaaaataaaatcttattgctagctcaaatgcaattcaactcagaactcgagaaacaaattaaactacgtacagaagatttagtagaacagaaaaatgaactctatcattctatcataatcaacaaatgtttaaatctttatacgagcatcatccagatccaatcttcacattagatttgtacggtaattttctcaaagtaaataacgctggtactactttactcggttatcaaacgaatgaattattaaaccagccttactattcactcatatacgaagaagatttagaagaaatgattaacgcctttcatcgcgtgaaaaaggggtattctatctctttagaaatacgggcgtaccataaaaacagagatatttactacttgcacgttaccgccgtaccgatctttttaaaggagaaaatttctggggtttatttaatgattaaagatattacagaaagcaagcaacaacaagaacaaattaatttcctagcataccatgacactttaacagagcttgcaaatcgacgtgcatttcatcaacatttagaacaggcaattgcgcgagcaaaaatatcgaaaaagccttttgctgttatgtttctcgacctagaccgttttaaagttattaatgataccctcggtcatcgagtaggagacctgttgctcatcgcagtagcaaaaaggctcgaaagaatagcaacatcaaatatgaaactcgcgcggctagctggggatgagttcacaatccttatcgagaattacaaaaaaaagccagatgtccaaaaaatagctgataggattgtagcggccatgaatgagccatttgaaatcgaaaatcaacatttacaaatctcaccgagcatcggaattgcaatatatcctgaagcaggtgaagatgcgctatccattttgcagcatgctgatatggccatgtacgaagcaaagaataaaggaaaaaacggtagctctctttacacgaaagaactatataaaaaaatggaacgaaaagctcgaattgaaaaagatttgcccatcgctttagtaaacaaagaattttatctcgtttaccaaccacaaattgatacgacaacaaataaaattatcggtgctgaagctttaatacgttggaaacacccactattaggtgacatttcaccatgtgagtttattccaattgtagaagagacgccacaagtagtcccacttggacattgggtattacaagaagcttgtctccaattaaaaatatggcatacctttggctaccaaaatttaaaaataagtgttaatctatccgcaaaagagttccggcaagatcaattaattgaaagcatttcacaaatattaaacgacgtgcaagtcgatccaaaatatgtaacccttgagttaacagaaaggattgcaatgattgacgagaaagaaacgttattaagactgaagcaattaaaagaatacggtatccaaacttccattgatgacttcggtactgggtattcttctcttgcttatttatcaatttttccaatcgacacattaaaagtaccgagagaatttacacaattagctgatcatcgtcctgaagaacgagccatcgtttctacaatactttccctcgcaaatactttaaatctttcagtcgttgccgaaggaattgaaaccgaaaaacagcttaagtttctgcaaaaacataactgtaaatatatgcaaggttactatttcagtaaaccacttactagtaatcagtttataaaatttctacaaaaaacccccagtatgaacaaataattcatactggggattttataatgctaaatatttttctcataatattcttctgcgatctcttcgtaaaaagctgcagatgtcgtatagaaatatggaattaaccacaggaatccaattcctaatgtaatacaacttaatataaaccagccaataaaacttaaacataaaatgaaatactccatcttatgtccatccatcatacgacgactttctgtaatagcttggttcagtgaatactcaggatgatcgtttataataaagtatgtcatcgcataagaaaaagatttaataatacctggaataatgaacaataacgtccataagaaaagataaagatttactaataaatataataaaaatgattttagaaatctctttccctctgaaaaccaaatgaatatattaccaatactagcttgcttttcacgaaggatatttaaaccaaggtaatatccacctaaagttaacggtccagtaacaaaaaatgtaagaatattcgttgaaagtgaaccatttgttttttgccaaccgaaaattaaagaaaatccccaatcaacactaaaactaaaagccgtgataagaattgaaatgagtagtgtagctccaacagctaatccccatttcccttctaatgaatctagtgcttctccttttaaatcactaatcatgcgtagcctcgcctcctatacacaataattctattagtatagcatgttactattgaaattcaccttttgaaatatagcgataaaagtgtgctgtcgtcgtactcatatacggactaagccaaagaaatcctattccaaaagtaagaagcgctaaaatagcccatcctatgaagctcagccataaaagaaacaaatctaacttatgacccttcataagattcttactttccttcatcgcctgcgaaacactatattctggattttcaatcatcacatagtacgtcagtgcataagaaaaatacatcacaatcataccaacaattgaaatttctagtagtacacagatagcaatagcaaacgacgcatttccttcttcaccaaaaaatgcaaataaggctactaacaatatcggaatccatgtacctgtatataataaaattgcaagcattgcccacattgttttcatcattcttttaaagccacgaaatccttcaaataagtaatctactttagcatcttctcgtatactgatctgtaaaaatacatttgtataaccgtatgatgtaatcccatacgatgcgctactcaaaattatcataatgcaataaaaaatcccgaatgtaacacttgctccatttgatattgtttgcccttcaagtgaacctgctagaccagcaaataagagaaatataataattcctggaattaatagtataagcattgcagccatcgaaacgacataacttaaaataaaatataaaattgttgatccaacacctagtccccattttccctttaaagagtacaatgcttctcgcttcatttcaccaatcattgattcatcccctttatgaaatataaattgttgtacacttctacttatacaagcatcaatataattataccagttttgtaaaattatccataaaatacacaaaaaaaaaatccgtaaaggcaaagcccttacggattttttcacttcatatcggaaacgtttaaacggttcacggcacgttgtaatgccatttctgcacgtttaaagtcaacatgtgcttgtttatcttgcagacgttgctcagcgcgacgcttcgcttcatttgcgcgatggatatcgatatggtttgcttcttcagcagatgatgataatacagtcactttatctggacgaacttcgataaagccaccgcttactgctacataatcagtgtgtccaccatttttcagacgaactgcactaatttttaatggtgcaacagttggaatgtgacctggtaagatccccatttccccactctctgcttttacacttaccatttctacttctttttcgtaaaccggtccatcaggagttacaatactgactggaaatgtcttcatacttcgtccctcctaaggccttacgccatcattttcttcgcgttttcaataacttcttcaatgccacctactaagcggaatgcatcttctggaaggtcatcatattttccttctagaatttctttgaaaccactaactgtattctttacaggtacgtaagaacctttttgacctgtaaactgctcagctacgtggaagttttgagataagaagaattgaatacgacgagcacgatgtacaactaacttatcttcttcagataactcatccatacctaagatagcgatgatatcttgaagctctttataacgttgtaaagtttgctgtacttgacgagctacttcataatgttcttctcctacgatttctggagaaagtgcacgagatgtagatgctaatggatctacggctgggtaaatacccatttgcgttaaacgacgctctaagtttgttgttgcatctaagtgagcgaacgttgtagctggtgctgggtcagtatagtcatcggctggtacatataccgcttggatagacgtgatagaccctttatttgtagatgtaatacgctcttgtaattgacccatttctgttgcaagtgttggttggtaacctaccgcagatggcatacgaccaagaagggcagatacttcagaacccgcttgcgtgaaacggaagatgttatcgatgaacagaagtacgtcttgtccttgctcatcacggaaatgctcagccattgttaaacctgttaatgcaacacgttgacgtgctccaggtggctcgttcatttgtccgaataccatcgcagttttcttgattacgccagaatcgctcatttcgtggtataagtcattaccctcacgagtacgctcacctacaccagcgaatacagagataccaccgtgctcttgtgcgatgttgttaattaattcctgaattaatactgttttacctacgccggcaccaccgaataggccgatcttaccacccttaatgtaaggagcaagtaagtctactactttaataccagtttcaagaatttctactttagtagataattcttcgaatgcaggtgcttgacggtgaattggatcacgatgtacatctgcaggaacctcaccatctaagtcaattgcatcacctaatacgttaaatacgcgaccaagtgttacatcaccaactggtacagagattggtttaccagtatcttctacttctgtgccacgaacaagtccatctgtggaagacatcgcaactgtacgaactgtatcatcacctaaatgaagtgcaacttcaaatgttaagttaatacttccgttttcgttgctttgttttaccgtaagggcgttgtagatttctggtagctttccgccatcaaacttaacgtctacaaccggacccatgatttgcgtaacgcgccctttattcatcgggttccctcctagctttcttttaattagccaactttctacgagcagctagcttttaattttttattggtttatagcttacgcgactcttttgacagagccgcttccgctttttattgaatctagctccagcggttagaatgttcggtggcttcgctttttcctacgaggcacaaatcgcctctacgtcaaaagctccatccccctctcattctgaacgaaccgcttccgccttttaatactattctaacgctgctgctccaccaacgatttccgtaatttcttgcgtaatcgctgcctgacgcgcacggttgaatgaaagtgtaagtgaatcgataacttccattgcgttgtctgtagcactcttcattgctgtcatacgcgctgcgtgttcacttgctttaccgtctagtaatgcaccgtacactaagctttctgcgtattgtggcaatagtacttttaaaatttcttcttcagaaggttcgaattcataagctgtcgtcggtttgtcagacgccacatcagtaagcggtaaaattttattttccgttacctcttgtgaaattttacttacgtaatggttgtagtagatgtacagctcatcataagcaccatctgcgaacatcgcaattgctcgagaagcaaggtctttaatatcagtaaatgatgggtggtcagataatccaactacttcatcaataatgttaaagccgcgacgttttaaataatcacgtcctagtcgtccaagcacaataatagaatattggtttgaatccatattatgacgttcacgaattacgttacttactgtacgtaatacgttactgttataaccacctgctagtccgcgatcagacgtaataacgatgtatcctgtacgctttacaggacgcgcatttagcattggatgattaatccctttgcttccttgcgcaatgctcgctactacttcttgaatcttttccatatacggaacgaaagatttagcattttgctctgcacggtttaacttagatgcagataccatctccatcgctttcgtaatttgactcgttttctttgtcgagttaatcttcgcttttatatcgcgtaaagatgccacaggttttcaccaccttttttccggaagttggcacgattagtaagaatcctcttcctaatctacgttgcaagatattcttgctcatgattgaaggaaaagaataggtgcacctactcttttcctttacatgacctttagcaatctcagagcccgagatgccttttatatatactatctagctccagcggcttgaatgctcggtggcttcacttcttcctacgaggcaaacaccgcctcttcgtcagaagctccatccccctcacattcagaacgagccgcttccgcttttattattcagaagctacaaatacttttttaaatccattgattgctgctgcaaatttgtcgtcatccgcaagtttcttagttgtgcggatttcttctaataagtcagtcgcattagaatctaaccaagcatggaattcttcttcaaaacgagtgatatctactactgggatatcatctaggaatccacgtgttaaagcgtaaagaatgataacttgtttctctacacgtaatggtttgtgtaatccttgttttaatacctcaacagtacgagcaccacggtttaatttcgcttgagttgctttatcaaggtcagaaccgaactgagcgaacgcttctaactcacggtaagatgcaaggtcaagacgaagtgtacctgatactttactcattgctttaatctgagcagatccacctacacgagatacagaagtacccgcatcgatcgctggacgtacgccagagaagaataggtcagattgtaagaagatttgtccatccgtaatagaaattacgtttgttgggatgtatgctgatacgtcccctgcttgtgtttcgatgaaaggtagtgcagttaaagaaccgccgccttttgcatcacttaattttgctgcacgctctaataagcgagaatgtaagtagaatacatcccctgggtaagcttcacgacctggaggacgacgtaatagtaatgacagctcacggtaagccgctgcttgttttgataagtcatcatatactactaatacgtgtttaccattgtacatgaactcttcacccattgttacaccagcgtaaggagctaggtataataatggagctggttgagaagcagatgcagttacaacgattgtgtactctaatgcaccgtgcttacgtagtgtttctactacgttacgtacagttgattctttttgtccaattgctacatagatacaaatcatatcttcatctttttggttaatgattgtatcaagtgcaaccgctgttttaccagtttgacggtcaccgatgattaactcacgttgaccacggccaattggtacaagagcatcgatcgctttaatacctgtttgaagtggctcatgaacagatttacgatccattacacctggtgctggactttcgattggacgagtgtttgttgtattgattgggcctaaaccatcaactggttgacctaatgggtttacaacacgaccaattagttcttttcctaccggtacttgcatgatgcgaccagtacgacgaacttcgtcaccttcacgaatttctgtgtaaggtcctaaaatgataatacctacgttgttttcctctaagttttgtgctagtcccataacgccgttagagaactctacaagttcaccagccattacgttatcaagaccatgagcacgcgcgataccgtcaccaacttggataactgtaccaacatcactaacttcgatttcagactgatagttctcgatttgttgctttatcagtgcgctaatttcttcagctctgatgctcatgtgcttcacccctatctattcttcattaattcacgctgaatacgtgctaattttccttgtaaacttccgtcataaatgcgatttccaatacgtactttaattccgcctagtaaatcttcatctacaacatttttcacgcgaattgcatcttttcccgttctctttgcaaatgcttcagcaatgttaagcttctcttcttctgatagaagacgagtagaatatacagttgcatccgctacgttacgttcttcattagcaagaacaacatattcatctgcaatttcaggtaagatatcaatgcgtttgttatcaattaaaatatataacgtatttaaaatagattcagaaacagatccgaatacgtttgcaagaaacgttttcttttgttcctttgaaatgttcggttgcgttaaaaagctatgtagttctccgttctttacataaacgttttgtacaaggcgtaattcctcttcaaacatttctaatacgtgtttttctttagcaattttaaaaagagcgacagcataacgttttgctacaatcccattgctcatcgcgcttctcctacttctttaatataatcgcgaattaacttcacttgatcttcttcttttaattctttttcaattactttagaagcaatttgaacagataaagaagcaacttgttcttgtaaagcagcaattgcttgctctttttcgcgttgaatttcttgtacagcagatgctttaattgattctgcttcttctttcgcagcagcaacaataacatctttttgatctacagcttgctttttcgctctttcgattaactcttgtgcttcaacacgtgattgttttaacatttcacgttgttcttctactaacttcttcgcctcagcattacttctttctgcagcgtcgatttcattagtaacatgctcttcacgttctttcataattcccattaaaggaccccacgcaaatttgcgtagcattactaatagaagtaagaaaatgaacaatgtataagcaatcgttccaaatggaatggcagcacctaataataaagttggcacaaggattcactcccttcaaaatatctaaattgatcatatgaaaaaaaaagacatacgtttcattcataaagcaatggcgaagaaagttcggaaaaacactcttcgccatctatgtaaggggagtctcccttatttgttcattacgatgaatgcaataactacaccgatgattggaagtgcctcaactaaagcaaccccgatgaacataattgtttgaagtgcgccttttaattctggttgacgagcaacaccttcgattgtacgtgatacgataagaccgttaccaatacctgcacctaatgctgataaaccaattgcaattgcagctgcgattacacctaaactcatttaatttgtcctcctttgtattataaaaaaataaattttttcttacttaaattatattaatggtcatggcttactttatgagccatataaaccatcgttaacataacgaaaataaatgcctggattgaaccaacgaatacactgaatcccatccatgctaacattggtacaagcgcacctaatgccccaaggactgatgctccgcccaacttagcaagtaatcctaataagatctcacctgcataaatgttaccaaataaacgaagacctaacgttaatgtgttagcaaactcctcaataacctttaatgggaataagaatttcataggttggaaataaccttttacgtactctttcgtacccttcatcttaattccataataatgggtgagggtaactaccatcacggctaatgttaatgtaactgctggatcagacgttggtgatctccaccatgcaatatgttcgccagcttcagttgctgaatacatgaatggtaaaccaaggaagttcgatacgatgataaacatgataagcgtaacgccaagcgttaagaaacgtccacctgttttccagtccatcgtactattgataatccctttcacgaagtcaaacacccattccatgaagttttgcatcccggttgggcgaagagctaagctgcgagttccgataacagcgattaagaaaacaataactgctgctacagtaaccatcataactgatgacaaatcgaacgttaaacctagaaattcaactaatttaccgtgttccactagtaattcacctctcttccctgctcttatactctaaataaagaaaatctatgatcatgacaaggtatcctgtcagcaatcctacacctaggccccacatcgcgattaactcttgatatttggctgcaaataaaattaataacccaatcgtggcgaatcttgaatatgtacttaccgctgttgccttgaacttcacgttttctccatttgttacgcgatctagcagcttgtctgttctacgtgcaatgatgcgcaaactaagaaaactgaaaatcgtcccgataatcagtccaagaaatacatccttgtaagaggtaaatccccatcctagcactagaagcgcaagcaagtagtacatatatttcttttgtctttggacaagtccatgtacgtctatcatcattgctctcccgaatagtaatgtcgaatgagtcgaatcattgcgtatacccctgttcctagtccgagtaataaccctataataagaaacaacggaaacgttccaaccttattatcaatccactgcccaccaaagattccaacaagaatagaaccgactaattgagcaagaatacctgacattaaagcataagcttttatatggctgcgatcgtttttttgcaaagattcatccctccaatatgtaaccctcattcacgatgtgttaataataactcatttttttgcataaatcctatacaaaacaaaaagtttacattttcgtcacggaatagatgtaattttgtcactgaaagccctaccatctatccccgttgttagcatacaatagggtattaacagtgtcaacgagaaatcgtaaaaaatctaaaaatttgagtattaggcatttcctcccaaaaatgaaaacgttccccttctaaatactggttacatatatgcaatttctaacagttttctctttataatagaaggaaatgttcacaagtttgtcactattatattttcgagatataacgcttttcttccataatatagtgttcctcagacgtaagacttctatattatatgtgaggtgtatgcaacttatgttgtatatacgatgtatatttatcctctccccctcccctacttgcttacaacaaaaaagacgagctgggaaatctcccctgctcgtcagttgtcttacttcgttccgaataaacggtcaccagcatcaccaagacctggtactacatatccgtggtcatttaatttctcatctaatgctgctacataaatatcaacatcaggatgttcttcttgtactacttttaccccttctggagctgcaacgatacacattaatttaatttgtttcgcaccgcgctttttcagagagttaattgcttcagccgcagaaccacctgttgctagcatcggatctagtacgataaagtcacgctcttctacatccgttggaagtttcacatagtattctaccggttgcaatgttttagggtcacggtataaaccaacgtgtcctacttttgctgctggaattaatttcagaattccatcaaccattcctaaacctgcacgtaaaatcggaattaaaccaagttttttaccagcgatcacttttgttgtcgctttgcttacaggtgtttcaatttcaatgtccttaagtggaaggtcgcgagtaatttcgaaagccattaaacttgctacttcgtccactaattcacgaaaatctttcgtacctgtattcttatcgcgaatatatgtaatcttatgttgaattaacgggtgatcaaatacatacagttttcccatgtgaatctctcctttagatgatattcatgcgtttgcacgcttttttacactatttacgattgtaaagaaaacgctactaatattcaagggcaaatttggcaaaatcatgattttacgatgaatctatctagtatctttaccaattatgggagctgtatccttcattatatcgccaaaatttattcatcatttgtatacatactttaaaaataatatatgtccacaaaaaagaccgccaaaacaattaagtctcggcagtcttcttcaatctattatagatttggatacattgtgaatttgctagttaacgcttctacacgcttacgtacttcttctaatgcagcttcattttcatgattttttaatgtataagcaataagtgacgcaatttcatccatttcttctaaaccgaaaccacgagatgttacagctgctgtaccgatacgtacaccacttgttacaaatgggcttgctgtttcaaatggaattgtatttttgttcactgtaataccaacttcatctaatacgtgctctgctactttacctgtgatttctaagttacgaacatcaatcaagattaagtgattgtctgttccgccagaaacaagtgtaagtccttctttttgaagaccttcagctaagcggttcgcattgttaatgatattttgtgcatatgttttgaaatcatcttgaagtgcttcaccaaatgcaacagcttttgcagcgattacgtgcataagtggaccaccttgaataccagggaagattgatttatcaatttgttttgcaaattgctcttcacataaaatcataccaccacgcggaccacgtaacgttttatgtgttgtcgttgtaacgaaatgtgcatgtggtactggatttgggtgtaaaccagcagctactaaaccagcgatatgtgccatatcaaccattaaataagcgcccacttcatctgcaatctcacggaatcgcttgaaatcgataacacgagggtatgcacttgcacctgcaacgattaattttggtttatgttctttcgcttttgctaatacatcatcgtaattaatacggtgagagtcagcatccacgccatattctacgaaattatattgtactccactgaagttaacagggcttccgtgtgttaagtgaccaccatgagataagttcataccaagtactgtatcgccttgctctaaaatcgtaaagtatactgccatgttcgcttgtgcaccagagtgtggttgaacatttacgtgctctgcgccgaaaatttctttcacgcgatcacgtgcgatatcttctactacgtctacgtgttcacagccaccatagtaacgttttccaggatatccttcagcatacttattcgttaaaacagaaccttgtgcctccattactgcttcacttacgaagttttccgaagcaattaactcaatctttgaacgctgtcttcctagttctgcctcaattgcagcaaataccttttcatcttgacgttttaaatgatccaccaaaatcccccttttctgaacgaattacatcgattcccaacagttttttcttatttattcagaaaaaacgaaaattcaggttgtaattctttcgaaccttcatgttttcaactacattctaacatgactttctatatcataaaagaaaaaaaagaccgaaaatcggtcttttctttcttctattataaagtcagacaacataccttttatcttatgataaacagttactatatgacttcctaatttctcatatttaacggcaagtggtagtctcttccactgccgcatagacagcacgcgctccaccaattagttttccacgtgttttggccatcgttacatgcgcacttccaattgccttcacacttgtacgaaccggaacagctacatgctttaaatgcataccgataaatgtatcaccaatatccattcctgcatcagctttaataaactcaactactaccggatctttcaaattgtgatacgcgtatgtccccaatgcaccacctgctgatctaacaggcgtaactgttacaatttcaaattgatattttatcgctacttctctctcaactactaaagcacggtttaaatgctcacaacattgaaacgctaattcaatacctgttcgctcttgaaattgttttaactcagagaaaatcgcctctgctacttccatcgttcctgatgttccaattctttcgcctagcacttcgctcgtgctacaacccactacaaaaatttgaccgctttgtaatgaagcttgttcttggaaatcagaaagcgacatttgtagctgttctcttacctttacgatttctgtcattacgcctcttcctttcacaggttggttcaccaaattatatttcacactactgatagttagaatctattactttgtttcgtatgttttaatttttcctacgcggttttcgtgacgaccaccttcatagtcagttgttaaccagattttcgcgatatcacgcgctagaccagcaccaattacacgctcgcccatcgctagcatgttagtgtcattatgctctctcgttgctttcgcgctgaaagtatcatgaactaacgcacaacggataccatttactttgtttgctgcgattgacataccaatgcctgtcccacaaactaaaataccacgatctacttcaccattcgctaccatttcagctgctggaaacgcaaagtcagggtaatcaacagaaccagcttcacattcacaacctaaatcaacatattcaatatttaactcttctaataaacttacaagttctttgcggatattcataccgccgtgatcagatgctattactactttcatttttacccctccaaagtttcaatcaattatcttcatttcacactcgctacctcatataggaagaagtgatctccaatatcgtattatacacgaaacatcaacctactgaatgttttttcagtaaagtttgtacaagtttttccatctcatctaacgtttctttataaatagaaagcgagcctccaaatggatctgaaatgtccttgcctataccttcagttaatccatataacgtatttaatttcttttcaacgctcggataatgcccaagtacaatttgtttatggttttctgtcatcgttacaacaatatcagcccaatcaagcaaagtttcatttacttgctgcgccgcatgatcaattaaaattcctttttcagctaaagcttccttcgcatgtaccgatgcatcgctcccaggataggcgaaaacaccagcagattgcacttcaaacttatctcctccgtgatgacgaagcaacgcctcagccattggactacgacatgtattgccagtacaaacaaataacactcgtttcattcaaacccacccctatattcgatttcttaccattcatcataacttacattagaatagaacaaaagaaatgtgaatatacaaaaggcgcatttctcttatattttttctaagaaaaatgagccttatccacatatatgtgaaaccctatttccaagtgcctagagtattttaacatacatgctgaacatgcaacaaaaataaggaatccatttcatacgaaacggattcctcttatattgcaattatttcattgtaactttcattacttctgttgaaccttttgtagctgctacgcctacagttgtcttaatagactcagctgcatctgtgtttgtaataacaattggagtaattgtgcttttcgctttttcacggattaattctaagtcgaatgagattaatttatctccagcttttacagcttggccttcagaaacgtgagcttcgaaaccttcgccttccatttttacagtttctaatccaacgtggattaaaatttctgtaccgtttttcgctttaattccgatagcatgttttgtgtggaataattgtacgatttcaccatcaactggagatacaactacaccttcagtaggatcgattgcaacaccgtcacccatcatacgaccagcaaatactggatctggtacttcttcaatatttttcactgctccagttaatggagctacgattgtttcttcatttgtttttgaaccaagaccgaataattttttaaacataggatagtcctccttataatttacctaaaagtttatagggcaatccctagtaaagctcgggatacatgtaagacttcatacttcgaatattatactgtaaaaacgctttcgaaataaattacgtcattactaatagactcttattgtagcgcttcacaaaattccagtcaattctgattgtctgaataacaattagaagttaacttctatttatattttctctttttttgcccaacttgtctagaggtctttactacattttattttttgttgttaatttgtaaaatttaattcaaacttttttcgaaattcacttgactaaagtaagtaactattttattattacttacgtaaggtaagttaataacttttaggaggtttttaaaaatgatggatttcggtctacttattattcgtcttattataggaattacattcatgggtcatggcgctcaaaaattatttggttggttcggcggttacggtttaaaaggaacaggtggctggatggagtcaatcggtttacgtcctggtgtatttatggcatttatggctggcgcaactgaattactaggtggtttcttatttgcatcaggtattttcattgtagttggttcattatttatcgttggaacaatgttaatggctatcttcactgttcacggaaaaaatggttactgggtaacacaaaacggatatgaatataacttaatgttaatcgctgtcgctgttggtgtagctttaatcggacctggcgcatacgttttactttaatttttatctcaaatttgagattcttgaaaaaagaacttacttcattacaattgaagtaagttctttttatgaaacaaaatattatttccagcaggattttctcatcgttatcttgtaaacaaacaataagtattcatatttagaaaggggattacaagcatgttatccattaatccaaatgaacaaactgaaaaagataattacaaattacttactggaagtatcatccctcgtcctgtcgcattcgttacttctgtaacaaaagaaggcgtactaaacggagcaccatatagttatttcaatattgtcgctgctaatccaccacttatctcagtatctgtacaacgaaaagccggagaaagaaaggacacttcccgaaacgcaattgaaaaaggagaatttgtcgtacatatttctgacgaatcatatgtagcagcaattaacgaaacagcagctaacctcccgccaaatgaaagtgaaattgaactagcaaaattaacaccaatcgaaagtgaagtcatctctgttccaggtgtaaaagaagcaaatattcgaatggaatgcgtattagaacgtgcaattccacttggcggaacggaagactcaccagcttgtgatctactaattggacgcgtcgttcgtttccacgttgccgaacatctatatgaaaaagggcgcattcacgccgaaggactcaaaccaataagccgcctagcaggacacaactatgcaaaattaggagaacaatttgaattggttaggccaatctaaaagcggaagcggctcgctcagaatcgcagggcacttcaagctctcgaccttgaagcgctttttgcttcatgcgagagagcgaaatgaccggagattctagccgctgaagctggataatatttaaaagtggaagtggcccgtttagctctgaccagctaaggttctctcgcacaaaaggtgctttttacctttcgtgcgggaggttcttagatgcgaagagctggccactggaactggataatatctaaaagcggaagcggctcgttcagaatcgcaggacacttcaagctctcgaccttgaagcgctttttgcttcatgcgaagagcttgccgctggagctggatatatttaaaagcaaggcggctagattcctcccatcactcaaatataaaatcccctgctttttagcaggggattttctcattgtaattcttccttcttttcctctaaagtaggcattttctcttttttcggcttccctagcttaattacgaagaagtatagggaaagcaatgtaataagaaaaacaattaaaaacgggtacggagagtaaaaggcacgcgccgcctcagtctttcccgcaacaaatttcaatgactcaatatctaaaaactcagcaaacatttgtacaccgagcatactaaaccaaaaaacaaaaaaactaataataataccaaaaacttgcttcaatctcgtcattcatctcatcctttctatatctgtaatttttagcgcaataaatatagtacaaacaaaatattcacagaaaggaactatctcaccattcacgaattaacttaatccaacctaacatcgaaatttgcaaaataataccccaaattataagtcttcttagccatcgaggatagaaggtcaaaaatttaacataccattccaatagcttgttcataattccctcctacataaaattatataggaaaaaggatatataatccaaacccaaccaaaatgataccacctactatctcaccatatgtaccgagcatatctttcgcatgtctcccaattaataaacccatccacgctaataacatgctaacaaatccaaaaagtaaaatcgtaataattgtttgtgccccataaataccaagactaagtcctactgagaaactatctatactgacgccaaatgcaaatacgaataaactaattccaataggggctgttctagtctcttcattttgtaaaatgctcgaatatacgatataaaaccctagtccgattaataaaatagcacccgcaaaatgtgcgatatctccatacttctctgataaaaaacgacctagtaccattcctataaacggcataataatatgaaatatccctatcgtcataccaatatacaggatttgtcttaactttaggggtatcatccccataccaagactcaccgagaacgcatccatccctaaggcgaatgccataattattaaaggtattagctgttcaaacgtcattcatgcccctccttggacgtgctacttcacaatatgcttatccaaggagaaatattctgtttgctaatcttaccttatcattcaataataatatgatgtcctgccgcttttgttaaacgattcataattgcattccctattccttcattagggaatgactcactaaaaataacatccacttcacttgcatcaaatgttctaagtacatcatataatttagtcgcaacactagctaagtcacttctaacaccacaagataatataacatctgcactatatacatgctgatactcttctgtcgttaatacgcctactttaaatccttcttcctttttctcatccacaagatgctgaataaactcacgtgagccctcaacaatactaagtggtgctttcggggcataatgtgtgtatttcattccaggcgatttcggtttttccttctcatcctttaaagctggatctaaagaaacagtacctatcaccgcttctaattgttctttcgtaatcccacctggacgtaatattgttggaaccgcgcttgtacaatcaattacagttgattcaacgcctactccagttgcaccaccatcaacaatacctgcaatcttcccattcaaatcttcatatacgtgagaagctaatgttggacttggacgccctgaacgattcgcacttggtgccgcaacaggtacattcgcctcttcaataagagcaagtgcaattggatgatcaggcattcttactccaaccgtattaagtcctgccgtcaccttctctgaaatcccttcttttctcggcaaaataattgttaatggtcctggccaaaaatgcgccattaacttctctgcaactggtggaatttctttcacaatcccatctaactgagattttgtacctatatggacaatgagtggattatcactcggtcttcctttcgcttcgaaaattttcgcgattgcttcatcatccatcgcatttgcacctaacccatatactgtttccgtagggaaagcaaccgcctcattttctcttaataattttgctgcttcttgtaactgtggataatatttttttctttccacaacattatccacaacccacatgtttgtatgcatttttttccacgtccttttctacccttaaatacttgtatatttttagtttactatgagatttatccaaaagacaaacaaggtttatccacaaaatgtggataaacctaattaatccgtggataactttgtgaatagctgacaatttagtattattgcattctgctcttttatatttttacaaaaatgttctagttgttgaattccctctggaacctcatccttttctatagtaaaaaagtcaaaaaactgaaagatcggtacagattgtggatgatttgttagtaagtacaattgttgaacacttttttctttcatatactgcaaaaacatttcaaaaaaatataagaaagtctgtttatccacatgaggtgtgaataaacaagaacgaataagcacatcttccccacttcgttcataaccaattacagctcgtatttcttccgcctcttccaaaatcataaattgtgcgtacaactcatttattttatcatcttttttattagcttgtccgaaaaaagaatgtaatctttccacatctgctttcgtagcaaaatacactttcttcataataaatccctcctcatttttatatatgaagagggatttattaatagtactatttagagaataaagatgtaaaagcttctacaataaacaatttaacttctggcttttcttcttcctcttctacttttacatactcattttgcttttcttgttttttctccacaggtttctccacttttcccacagtttttatttcttctttacttacaggctgctcttcgacttttgtttcattttttactactttcttttcagaagctgttactttttttactacttcctgctttacagctttcgtttcttttaccttatctactttcttctcttctttatctattacttcctcatctagttgtttcacctgctcctcttcaggagattccgccttcacaacgtgctcttcttttcttacagctgtcccgctcgaaaaatctaagaaacacattggtggaaataatacacaccaccagttcgccccttcaccttctccaattgtgattaatactgcttcatattctcctgctggataaataaaattcccgtatacctttgtaggaaactttacattcttactaaatttcacttgaaatgaatctttacttccttctctttttaacgtattttccaccgttttctcgatttctggaatatgactttgaattactttgcgtgcctcttcaaatgaagttaaatccgctacccacccatcaatttgtgcttttacttcatcacgcactttacgctttaatgcctggtctttatctgaatcactatttgctaaaattcgtaatcgaacggcctctttcggaataactgaaggccctttcgcatcagctttcatatatccaaactgcacaagtaactgtgcaccaattaatagtataagaagataagcaataacttgttttttcatttcctccaccgtcccttctacaaacagtgtggacagactttcatctttctaaactattaaattcaaaatctatatgaatttttccacaaaaaaatagagtaaggtgtgaaccttactccatctctgcaaataccatacgatcttttccgttaatatcgaaaacaacctcaacatgagcatgtggaaaagcttgttgtaacaatctttttacatcctcaccttgtcctactccaatttcaaacgccacaatcgctttcttctgcaacacattcggcaattcttccataaaacggcgatagaaatctaatccgtcttcaccaccaacaagtgctctcttcggctcatgctctttcacaacaggagaaagaccacgccaatcctcttccggtatatatggaggatttgaaacaacaacatctagcttttgacccgttttatgaaatggtgacaataaatcaccgtgatagaacgttacttctgcacctaaagcttttgcattttcttttgcaacttcaatcgactcttgtgcaatatctactgtatacacatgaagattttcattttctaaagcaagcgtaatagaaatcgctccactacctgtacctatatctgctacatgtagtttctcatcaccaaaatggcgctcgattctttctaatactcccactataagctcttctgtttccggtcttggtattaatacttcttcattcacaaagaaagaccgtccataaaacatttcataaccaatcatatattgaataggaataccttctacatgcttgtggataaactccgtaaagcttttctcttgatcctcagttatttcttcacgcatattcataagtaatcctgttctgttcacctttaatacatgacaaaggacaatttctcccgcattttcatctcgtccattttcctgtaaaaaagaagaagcccatttcagggcttcatagacacgcattactcagctgcctccatcttttgagcctgatcttccatcactaaggcattgatgaaatcatctaacttaccttgtaagatttgatctagcttttgaatcgttaaaccgattcgatggtctgtaacacggttttgcgggaagttatacgtacgaatacgctctgaacgatctcccgtaccaacagcttgtttacggttttgatcatactcagcttgcgcttcttgtctaaacttatcataaacacgtgcgcgtaatactttcatcgctttttctttattcttgatctgtgatttctcatcctgacaagatacaactacaccagtcggtaaatgcgttaaacgcaccgctgacatcgttgtattaacgctctgtccaccaggtccactagaagcgaatgtatcaacacgaacatctttctcatgaatatcaatttctacttcttctgcctctggtaatacagctactgttgctgtagatgtatgaatacgtccaccagattccgtttcaggaacacgttgtacacggtgagcaccattctcgaatttcagcttcgcgaaagcacctttaccattaatcataaagataatctctttatatccacctaactctgtatagctagcctcaataatctccgttttccagccctgtacctcagcgtaacggctatacatacggtataagtcaccagcaaataaagctgcctcatctccaccagcagctccacgaacctcaacgataacgttcttatcatcattagggtcttttggaacaagtaaaattttcagacgctctgataatgttttatcttgtgattctaactcagaaacttcttcttttaccatttcacgcatttctgcgtctaacttatcttctaacattgctttcgcatcttttaattgctcacgaacatccttatactcacgatacacctctaccgtttcctgtatatcagactgttcctttgaatattcacgaagcttatttgaatcactaataatcgctggatcacttaacaattcatttaacttctcataacgattttctacagcttgcaaacgatctaacacatcattcacctctacatcctagtatctaatacaaatagtatatggtacttactcaaaaaaacgcaaattatatttaaaagtggcggtggctctttcagctctgaccagctaaggttctttcgacctaaaggtgctttttaccttttgggcggaaggttcttagatgcgaagagctagccaccagaactagatatatttaaaagcgtaagcggctcacaccgctcattctctctattttgaaaaaaacccgccttgcgcagcgagttttacttatctttgtttgcaggtactgcatgacaatgacgacaacgcggttcatacgtttctgaagctccaactaaaataattggatcatcaaatgccgctggttctccatcaattaatcgttgtgtacgacttgctggagatccacatacagaacatactgcttgtagttttgtcacatgttcagcaatcgccatcagctgaggaacttgtccaaatggtagaccacggaaatcttggtctaaaccagctacaatgacacgatagccacgatttgccaatacttgcaccacttccacaatgtccccatcaaaaaattgcacctcatcgattgcaataacatccagctcttctgtaatatgttcaaatatatcctttgaagctgaaacaggaactgcttttacctttaatccgttatgtgatactacatcttcttcactatatcgattatcaatacatggtttaaatacaattgcatgttgttttgcaaattgcgtacggcgcacacggcggattagctcttctgacttgccagaaaacatactaccgcaaatcacttcaatccagccattttgatttattaagtacatgaagctctcctttcatctacttttcagttaaaagtagggtaaaggtataatattttcgcaaaaaaaacagacaagcgaatacatacacttgcctgttttatgtttttattacttaagaccgtatttcttattgaagcggtcaacgcgtccgtctgcagtagcaaacttctgacgtccagtgtagaatgggtgagaatcagaactgatctcaacttttagtaatggataagtgttaccatcttcccactcaacagtttcgttagatcctttagtagatccgcttaagaatttgaagcctgtgtttgtgtccatgaatacaactttcttgtaatctgggtgaattcctgctttcattcttttcatctccttccgccctgaatcattttcgaaacagagtttttcatcttcagctgcatacacaactatattgatgaaacacatatgatgaaattataacaaggctaacttcattttgcaactacctgtttttgtctttttaattttaaaagcgcaagcggctcgttcagaatgggagggggatggagcttctgacgtagaggcgctttttgcctcgtaggaagacgcgaagccaccaaccattctagccgctggagctggatattaaatttaaagtggaggtggctcgctcagctctgaccagctaaggttctttcgacctaaaggtgctttttaccttttgggcggaaggttcttagatgcgaagagctagccaccggaactggatattatcttaaagtggagacggctcgttcaaaatcgcagggcattggagctctcgaccctgaagcgctttttgcttcatgcgagagagcaaaatgaccggagattttagccgctggagctcgatattatcttaaagtggagacggctcgtttagctctgactggctaaggttctctcacttatttctctctttaatatcacctaaacagcataaaaaactcgcttactataaaataagcgagtcctgattttttccctttacttagttgttacatacctttttgagtctgcaacaatgttttgtaaaaactcttcatttgtcttcgtttgacgaagcttacgtaagaaactttcaacgaagtctggtgtatcacgcattgttttacgaatgccccataacttgtctaaatgttcttttggaattaatagatcttctttacgtgtaccagaacgacgaatatcgatcgccgggaagatacgacgttcagctaatgaacgatctaagtgaagttccatatttccagttcctttaaattcctcgtaaataacatcgtccatacgtgatcctgtatcaacaagggctgtcgctaaaattgttaagctaccgccttcttcaatattacgcgcagctccaaagaaacgcttcggtctatggaaggcagctggatcgataccacctgataatgttctaccacttggtggaataacgaggttgtaagctcgagctaaacgggtaatactatccattaaaatgataacatctttcttgtgctctacaagacgcatcgcacgttctaacacaagctcagctactttaatatgattttctggcacttcatcaaaagtagaacttacaacatctcctttaacagaacgttcaatgtctgttacttcctctggacgctcatcaattaaaagtacaattaattctgcttccggatgatttgttgtaacactatgcgcgatttcttttaatagacttgttttaccagcctttggaggcgcaacaattaaaccacgttgtccaaatccaactggtgcgattaaatccatgatgcgtgtcggtaactttttaggttccgtttccaatttcatttggcgatctgggtataatggtgttaatgcagggaaatgcacacgctcttttgctgaatctggatcatctccgtttacagcttcaacttgtaataacccaaaatagcgttcattttctttcggaggtcgtactttaccagaaaccttatctccattacgtaaatcgaaacgacgaatttgcgaagctgagatataaatatcttctgagcttggagaatagttgataggacgtaggaatccaaatccttctgattgaataatttctaatacgccttccatgaaaaagaaaccttctttttctgctcgagctttcaaaatagaaaaaattaactcttttttcgttaatttgctataatacgaaatcttaaattctttcgcaagctcgtataactcttttaatttcatgttttctaatgctgcaattgacaaattcattcagacaccacactttaacgttattctcttttttcatgggtaaagggaaaaaatacggaaggcaaataattaataatgaaaggcaataagttcaagtagggtaatattcactattgtaacccttttatctagttttaatcaatacgttggaacacaaatacaagaagcgaagacaagaaaatttgtcttcgcttcttatttaatttagttccagctccgatagttagaaaagtcgaccattttaacctttctgaacgagctgcttacgctttttatttaataaccaagtttggttttttattcaagctatgacgtccatccacgaagcgaactgtgcctgattttgcgcgcataacaagggattgcgttgttcctacgctacctttaaattgaacaccgcgtaatagttctccatctgttacgcctgttgctgcaaagattgcatcgtcaccttttactaagtcctccatacgaaggatacgattaatgtcttctatgcccatttttttacaacgtgctaattcagcttcgttttgtggcaatagttttccgtgaatttctccacctaaacattttaaagcaactgctgctaatacaccttcaggtgctccaccagatccaaataaaatatctacacctgtacgatcaaacgctgtattaatcgctccagctacatctccatcattaattaatttaatgcgagcaccagctttacgaatttcttcgataatttcttgatgacgtggacgatttaaaactgtcgctacaacatcttcaatatctttattttttgctttcgcaactgcacgtaagttatcaataataggcgcatcaatgtcgaccgccccgactgcttctgggccaaccgcgattttatccatgtacatgtcaggggcatgtaacaaattaccgtggtctgcaattgcaataacagcaagagcattccagccaccagctgctacgatgtttgtcccttctaaaggatcaaccgcaacgtctacacgtggtccatatcctgtacctaatttctctccgatatatagcattggtgcttcatccatctcaccttcaccaattacaactgtacctttcatcggaattgtatcaaatacatcacgcatagctgatgttgctgcaccgtctgcctcgtcctttttcccgcgccccatccaacgcgctgatgataaagctgcagcctctgttacacgtactaactccatagataaacttctttccacgataatccctctcctttaagtctttatatttctgccctattttgtgaaccgtgtttttctataaagtgtacttccgcaagtagtgatgcttcgcttcccccttgcggaagtatcacttatgcgttcttcatttcttcaatttcttgctttgtcatttgttctcgccaaatgtttgctccaagccctttaagcttgtccactatattctcataacctcgatcaatatgctcaagtcctgttacttctgtaattccatctgccattaaacctgcaataacaagtgccgctcccgctcgtaaatcactcgccttcacttttgcaccttgcagtaacacaggaccagttacaattgccgaacgaccctctactttaatttgagcattcatacgacgtaattcatcaatgtgtttgaaacgggcaccgtaaattgtatctgttacaactcccgtcccgtgcgcctttgttaaaagcgtcgtaaacggctgttgtaaatccgttggaaaacctggatatacaagcgttttgatatcaactacttttaactttctattaccgttcaccgtaatttgatcatcgttcgtttcaacttgaacaccagcttctcttagctttgcagtaactgattctaaatgctgaggaataacgttatcaaccgttacttctcctcctgatgcagctcctagaatcatatacgtaccagcttcaatacgatctgggatgatagtatggtgacaaccatgtaaagagtcaacaccatctattcggattacatctgtaccagcacctttaatacgggctcccatgcttgttaacaatgtagctacatcaatgatctcaggctctttcgctgcattttcaataacagttctaccttttgctcgtacagctgctagcataatattaattgtagctcctacactaacaacatctaaataaatacgtgccccgcgtagctcatctgctcttaaatagatggcaccttgttcattcgtaacatgtgcacctagcgcttcaaaccctttaatatgctgatcaatcggcctcgggcctaaatgacatccacccggaagcccaataacagcttttttaaaacggccaagcattgcacccattaaataataagaagcgcgcaattttttcacttttccatttggcaaaggcattgcaaccatgttagaaggatcgactaccatttcttcctcctgtccataagttactttccctccaatttcctctagtaagtctcctaacattttcacgtccgaaatattagggacaccaccaatagttactggagtatctgctaaaattgtcgctggaattaatgcaacggcactgttctttgcaccacttactcgaattgttccatttaaagctcttccgccttcaattagcaatttttccatattgagctcccttcttgtgaatgtatttactttctatctttttatagaaagctccccttaagaatctcaattactctttccatcccaaaactcaataaataggaaaccattatcttcatttctcctgtagcacgaatagataaagatcaactattcatcgaattcactttatcaatttagatacgttatcacatttattaataggactatgcacattattttctatttaaaaaccaaaaatgataaaatctttagacttgttcacgctttcattatacaacgaaaggaaaccgtctaaaagactagacggtttccaaaacggaattttattcttacgctttaccgttagaaccgaattcgcgaattttaccaataacagttgctttgatagcgtcgcggccaggtccgataaatttacgaggatcgtaaacttcttggtctttgtttaatacttcacgaacagcttttgtaaactcgatttggttctcagtgtttacgttgatttttgaagtacctaaagagatagctttttcgatatcagcagttgggataccagtaccaccatgtaatactaaaggtacgccagtgaagtcacgaacttgttccatttcagcgaatcctaagttaggctcacctttgtaaggaccgtgtacagaacctaaagctggagctaggcaatcgatacctgttgcttcaacaaggtgcttacactctgctgggtcagcgtaaattacgccttcagcgattacgtcgtcttcttgtccgccaactgttccaagctcagcttcaacagatacgttacgagcgtgtgcgtattctactacttgtttagtagtttcaacgttttcttcgaatgggtggtgagaagcgtcgatcattacagatgtgaaacctgcatcgattgcttctttacatttttcgaagcttgaaccatgatcaaggtgaatcgctacaggaacagtgatgttcatttcttcgattaaagctttaaccatagctacaactgttttgaaaccagtcatatgacgagctgcaccctcagatacacctaggattacaggagatttttcttcttccgcagcagctaagatagcttgagtccactctaagttgttcatgttgaattgaccaactgcgtattttccttctagtgctttgtttagcatttctttcatagaaactaaaggcatggtgaatcctcctaaaaaacgttttttgtatccgataagttcttatcgctggtagtatgaccagaataaggtaaaatatgtatatctacataccggacttttttctacactcaataggataacaacttgtactcaaaaactcaaccgtattcacctgcacaatagtccatgtaaacgcttttttccatattttttataaaaaattcatttttacgcctctacagcgagctcatttctcacagcttgacgaatttcatcaatatcaaatggtttagcaaaatgcattaaagcacctaaatcttttgcttcttggatcatatcaagctctccataagcagtcattaaaattactttaatactctcatcaatttcttttacatgctttaaaatctctataccatccatgcctggaattttcatatctaacactactaaatctggattatcttttttcacgatatctaaagcttgaaatccatttgctgcttggaatgtctgataaccttctttttggaacacttcatgtaatagcacacgaatcccatattgatcatcaacgattaaaattttaccttccataattcccaacctttctgtgtaagtacaagatttaaagcttcttatatcttaacgatttattttcgctattctttggcaaattccttcctattctttcttattttaccgtttcctattttgttatgctaccctacgatttcacctttctaaaaaaataaactataatgaaagccggcaaacacgtacgaagggagtaacattatgttaaaaattttttcaactcaattaagtggttatttctccagagtttctcaaaaagaagaaatgaatatagaagatagtgctcgtttacttgctcaagcactagttggcgatggtttcatttatttacatggtacaaatgaaatggaaggcgttgttgccgaggcactattcggtgctgaaccaatgaagcaagcaaaacgcttatttgaaaatggtaaagaagcagaagtaacctctgcggatcgtgtacttcttattagccgtttttcaacagatgaagcggttgtagaaattgcaaaaaaactacaagaagagggacactctattgtcggcatttctgctcttcaagaaggtacggaatcactcgaacgatatacagacgtacatattgatacaaaactgttaaaaggtcttattccagacgatgaaggtaatcgctacggattcccaagtttaatagtagctttatttgcttatcacggaatcaaatttacaatcgatgaaatgttaaatgaatattaaaaaaagcgccttatttcaggcgctttttttattacttgctctctttattcgtaatagaagctcttacgaagtcatggaacaatggttgtggacggtttggacgagaaacaagttctgggtggaactgtgctgccacgaaccaagggtggtcttttaattcaatgatttcaactagacggccgtctgggcttgtaccagagaatacaaatccttctttttccatatccggacggaactggttgttgaactcataacgatgacgatgacgttcatatacaaccggctcattataagcattgtaagcatttgtttcttcagcaagcttacatgggtatagaccaagacgaagtgtaccacctaggtcctctacatctttttgttctggtaataagtcgatgattgcatatggtgtgtcagggttgatttcagaagagttagcaccttctaaacctaatacattacgtgcgaattcgattgatgcaagttgcatacctaagcaaattcctaagaatggaactttgttttcacgagcatattgaatcgcaacgattttaccttctacaccacgatcgccgaagccacctggtacaaggataccatctgtatcgccaactaattcttttacgttttctgctgttacgtgctcagcatttacccattttacttctacatctgtgtcgaatgagtaaccagcatgacgaagtgcttctacaacagaaatataagcatcttgaagttctacatatttaccaacaagagcgatttttgttttcttagaaagattacgcactttgttaactagcgcaatccactctgtcatatctgcagctggattgtctaattttaagtggtcacaaacgatttggtccatgttttgttcttgaagagataatggaaccgcatataaagtatctgcatcgcgagcttcgataactgcttttgtatcgatgtcacagaataatgcaagcttgtctttcatatcttgagaaacaggcatttctgtacgaacaacgataatgtttggttgaatacctaagctacgaagttctttaacactatgttgtgttggttttgtcttcatttcacccgctgcttttaagtacgggattaacgtacagtgaatgtacattacattgtcacgaccgatgtcgctcttaatttgacggattgcttctaagaatggtagagactcgatgtcaccaacagttccaccgatttctgtaataacaacatccgcatttgtttcacgaccagaacgatatacgcgttctttaatttcgttagtaatatgaggaataacttgaactgttcctcctaaatattcaccgcgacgctctttttgaagaactgaagagtaaattttacctgttgttacgttgctgtatttgtttaagttaatgtcgatgaaacgctcatagtgaccaaggtctaagtcagtttctgcgccatcatctgttacgaatacctcaccgtgttggtatgggctcatagtccctgggtctacgttaatgtatggatcaaacttttgaatcgttacgtttaaaccacgattttttaaaagtcttccaagagatgctgctgtaataccttttcctaaagacgatactacaccgcctgttacaaaaatatacttagtcatgaaaaagctcccttctattttgctgttatataatcaccgttgcaaagcgcaacgtatgtagataacactgtatccatcttattgttagactctttttattttctaaacaaaaaacaaaaaagaaaattgctcccctcatcacaaaaagtaataagtagggagcaattttcttttatatttacactttaaaagtattatcgtccttttttaaagagcccaaaaatgattctacatggacgataatgaaaagtcaagaactacagttcttcctcttcttcttcttcagtttcatcatactcaagttcttcttcagcgaagtcgtcgtcatcttcgtctaaatcatcaagatcgtcgtcatctccgtcttcttcttcaagaaccttgtccaaatcttctacatcgtcttcatcttcacttacgtctgcatcgtcgaagtcatcttcgtcttcttcaatgtagtcgtcaaaaccgtcttcttcaactttacgtttcttcttcggttttggttgaggcaagatttcttcatcaatttgctcatatgggtaccagctgcgtagtccccaacgattttctcctaaattaatgaaacgtccatcgatgtttaagtctgtataaaattgtgcgattttcgcattaacttgctcttgagatagtcccagcacttgagcgatttcttgaaccaactcgttgaatgtcgttgcttgttttttatcccctaaaacgctatgtacaacttcaatcattgaacattcttttagctcttctggtgaatattgcttaaaatccacttatgcggcacttcctttcatcaaatataaccttatatataacggcctgcttaaaaaaatccatactattcattataaacaaaagtcgcacaaatatgctacaaaaaaaacgggaaacttttatagggtagtaaaattataatttgtctgttccttatttcggaagcatatgggccccttgcaatacatacctaatttgcatttctgtatattcttcgagcgtatacagtttttgcagcgcccagcgtctaaatccccacatctgtccttgtataaaaatattatgcgcaagaagctgtatttcttttttatttaatgtaaatgttccattttccgtacactgttctaaaatattctcgaacattcctaccatttgaaactccttttctaatacatacggaagtgattctttcggtaaaaagcgtacctcttgatacattatcaatacttcttcctgtaattcgtccatcactttaaagtaattcgttattgctatctttaaactttctatactccctttttctgtacacactacttcctctaatctttcttttacatgttcatatatactatcacaaactaaatataaaacatcatctttggtacgaatgtactcataaagtgtccctatactaaacccagccgcttttgcaatctctctcgttgttgtacgcggaaatcctttttgtttaaacagttgcaccgcacctttaatcatttgttcacgtcttaacgcaactaatttttcatctttcaccgatgcatgcacattatgtttaaccattcccttcacctctctctattattttttggaaggaaaaagcgtaggaaaatacctacgctttcgttcctacttcgttaacatacgagaaattacaagcctctgaatctcttgtgttccttcatatatttgtgtaatctttgcatctcgcatataacgctctactggataatctttcgtataaccgtaaccaccaaatacttgcaccgcttcagtcgtcaccttcatcgctgcatcgcctgcaaatacttttgacatcgctgattcttttccatacggaagcccttctgattcaagccaagccgcttgatatgttaaaaggcgtgctgcttctacatctgttgccatatccgcaagtttaaagccaatcccttgctgcgccgcaattggttttccaaactgatggcgctcccttgcatattctacagaagcatctaaagccccttgtgcaatcccaacagcttgcgccgcaataccgttacgacctccatctaatgtttgcatcgcaactttaaacccttgcccctctcctccaagtagattctctacaggaatacggcaatcttcaaacataatttcagtcgttggtgaagagcgaatccctagcttgctctccttcttcccaactgaaaatcccggtgtatcactttctacaataaatgcactcgtaccgcgctgcttcgattcaggatcagttagcgcaaaaacaacataaatatcagcaataccgccatttgtaatgaaaatttttgatccatttaaaatataatgatcgccatctctctttgcgattgtcttcattccaccagcatccgatccagatcctggttccgttaagccgtatgcaccaattttcttcccttcagccatcggccgtaaaaacttttgcttttgctcttccgtcccaaatttaaaaattggccatcccgcaagtgaagtatgcgcagacagtgttacacctgttgaagcacaaacgcgagataattcttcaatagcgattacgtatgctaagtaatcgcttccaattccaccgtactcttcaggccatggaataccagttaaaccaagctctgccatttgatcaaataactctcgatcaaatcgctcttcttcatcacgctcagctgctgttggtgccacttcatttttagcaaaatctcgaaccatttttcttatcatttcatgttcttctgatagtttaaaatgcatctccgtctccccctcgcccttttataaagcacggctaataacaagtttctgtatttcacttgttccttcatatatttgcgtaattttcgcatcacggaaaaatcgttctactggatagtctttcgtataaccgtaaccaccaaatacttgcaccgcctcaatcgcgacttcaaccgctgtcttagaagcaaataatttcgcaatagatgcttctttaccgcatggtaatccttgtgccctaagagatgccgctctatatacgagtaaccttgctgcctcgacacttgttgccatatctgcaagcttgaagccaatcccttgctgcgccgcaattggcttcccgaattgctctctttcttttgcataatcaattgcacagccaagcgccgcttcagcaattcctaaagcctgcgcaccgattccaattcgcccaacatctaaattcgccatcgccactttgaatccttgtccttcttccccaagtaaattctcagctggcactttcatatcttcaaaagtaagttgtactgtacgagaaccgagaagtcccatcttatgttcatcttttccaatgattaaaccaggtgtatctttctctactataaatgcagaaataccactttttcctgcctctggatttgtagaagcgaatacaatgtatgtacttgcttcaccaccatttgtaataaacactttcgatccattaataatataatgatcaccttttttcacagctcttgatttcaaactccctgcatctgatcctgcatttggctctgttaaagcaaatgcacctaaatattccccggttgcaagtttagaaacatattttttcttctgttcttctgttccaaaatataaaatcggattcattccaactgacgtatgtacagctaaaattacaccaactgttgcacttacctttgagatttcctcaattgctagaatgtaagaaataaagtccatttctgccccgccgtattttgcaggcgctggaatacccattaatccaagctcacccatcttttgcaaaatctctttcgggaacaccccttgttccatactaggaacaaagggagctatttccttctgtgcaaaatcccgaaccattttcctcatcatttgctgctcttcattaaaacgaaagttcatatattccgcctccatttgctatatatcctttaaataatttggtaagaccactatgttgtaacaaagggggcatttattcgtaaacgtagaatccacgacctgttttacgccctaaccatcctgcattcacatacttacgtaataatggacatgggcgatatttactatctcctaatccttcatgcaacacttccataatgtataaacacgtatctaaaccgataaaatcagcgagtgtcaaaggccccatcggatggttcataccaagcttcatgacttcatcaattgcttctttcgtcgctacaccttcatataacgtataaattgcttcgttaatcatcggtagtaaaatgcggtttgatacaaaacctgggaaatcattcacttcaactggtactttcccaatttttttcgtaatatcttcaattgcttcatataccgcatcatcggtagccaaaccacgaataatctcaacaagcttcataactggaactggattcataaagtgcataccgattactttttccggacgcttcgttaccgctgcaatttctgtaattggcagagatgacgtattcgtcgctaaaattgcgtgttctggagcaatttcatctagattcgcaaagattttctttttaatatccattttctcaacagctgcttcaataataagatccgcttctttcacacaatctaaatcaagcgttactgtaagacgatttaatgtcgcttccttctcttcttccttcatgcgtcctttttctacttggcgcgctaagtttttcgtaatgatagccattcctctatctaattgctcttgctttaaatcttgtaccttcacgtcatatcctgccattgcacatacttgtgcaattcctgatcccatttgccctgcaccaattacaacaatgttttgtacacccattttttcttcccccttaattgttaataaattttataccctcgaactttaattagtggacttcaatcatcactgcgtccccttgaccgccaccgctacaaatcgaagcaattccaattccgccgccgcgctgcttaagtgcatggattagtgtaacgataatgcgcgctccgcttgctccaattggatgtcccatcgctaccgcgccgccatttacattcaatttttccggatcaattcctgcgatttctgtacttgcaattgctaccgctgcaaatgcttcattaatctcgaataaatcgatgtcttcaattttcttgcctgttttttcaagcaatgcgttaattgcataacctggcgttcttgggaaatctttagattccactgcaattgctgtatgcgccaaaattgtcgctaatggctttcttccttcttgcttcgctctgtcttcgctcattaatacaagtgcggcaccaccatcatttagtcccggcgcattaccagctgtcaccgtcgctgtcttatcaaatacaggttttaactttgctaacttttcaatcgttgtatcttcacgtggcgcctcatcctttgcaacgacaataggatcgccttttctttgcggaatcgttactggcacgatttcctcttcaaaacgcccttctttatgcgctgaaaccgcacgctgatggctacgatatgcccattcatcttgcgcttcgcgagaaattccatcttctttcgcaacttctccgccataaacgcccatgtgtgtacctgaaaatgcacatgttaaaccgtcagcaacgtttaaatcaacaacttcgttattgcccattctgtatccccatcttgctccgcgtaaaatgtaaggactgttactcatcgactccataccgccagctacaattagtgattgatcgccagtacgaataatctgatccgccaacgtaaccgcacgaagccctgatgcacaaactttattcactgtttccgtctgcacttcccatgggattccagcggcccttgcagcttggcgcgatggaatttgcccctgtccaccttgaataaccgttccaaatataacttcttcaacatcactagccgcaacatttgctctttcaagcgctgctttaattgcaattcctccaagttccgtcgcttttacatcttttaaagatcctccaaattttccaactggtgttcttgcagcacttaaaataactgttttactcatgtttctttcccccatttcattttttaacactgagcgcccgctcggtatccctacgttgagaagaggtgcaatcattgcacctctttctaaagttgtatacattcttacaaactacatcgcttcttttttctgtccgataacagatcgttctaaaatctctgtcacatcaagagtttgaactttctcttctacctctttcgctttcgttccatcactgatcatcgttaagcaatatggacaacctgtaccgataatggatggctgtacagctaatgcttgttctgtacgagcaacgttaatacgtgaacctgttgtttcttccatccacattaagccaccacctgcgccacagcacattcccgtttcacggttacgtgccatttctacaagattcactccaggaatcgctttcaaaatgtcacgtggcgcttcatacacttcgttgtatcttcctaaataacaggaatcatggtacgtaactgtttcttcaatagcgtgaacaggctttaagcgcccttctttcacccactgagctaacaattctgtatgatgatagacttctgcttgcaagccaaagtccggatactcatttttaaatgtgttataagcatgaggatcaatcgtaacgattttcttcactcctgccttttcaaattcttcgatattctttgtcgccatctcttggaatacaaattcatttccaaggcggcgtggtgtatctccagaattcttttctttattaccgagaattgcgaatgaaatgcctgcttcgttcattaacttcgcaaacgatatcgcaatcttctgactacgattgtcgtatgatcccattgaaccaacccagaataaatactcgaattcctccccagcttttgatttttcttttacagttggaactgttacttcgtcatcaccttggcgccatgtttcacgctctttacggttcagcccccacggatttccttgacgctcgatatttgtcatcgcgcgttgtgcttccgcgtccatttttccttcagtcaaaacgagatatcgacgtaagtcaataattttgtcaacatgctcattcataactgggcattgatcttcacagttacggcacgttgtacatgcccagatctcttcttctgtaataacatctccgattaaactcggatcgtaagcgagcgttgtagacgctgattcttgttgcccttttccagctgccatcatcgctaactgatttccttgtgtattattgaaggcaactactggaacccacggtgcttttgatgttaccgcagctcctttatcagttaaatgatcgcgaagttttaaaattaagtccatcggtgataacatttttcctgttcctgttgccggacacatatttgtacaacggccacactctacacaagcgtataagtcaataagttgattttgtctaaagttttcaattttaccaacaccaaatgtttcttgcgtttcatcttcaaaatcaatcttttcaagcttccctgggtttgaaagacgaccgaagaatacattagctggtcctgcaattaaatgcgcatgttttgattgtggaacatacactaaaaacgttaacaaaattagtaaatgcacccaccaagaaaaatagaacactgaaatggctacggtttcatttatcccgctaaaaacgtaagcgattgcagaagcaattggttcactccatgaaagctcctcgccatgccatataagtcccataccgttaccaagtagcacagaaatcattaaaccaccgataaaaataagaacaagacctgatttgaagttacgttttaaacgaacaagcttttctacataacgtctatgaaaagcccaaaatactgcaattaaaataacaagtgtgacaatttcctggaagaatgtaaatgcagggtatagtggtccaagtggaagatgtgatcctggtgcgagtcctttccaaacgaagtcaattgctccaaattggacaagaataaatccgtaaaagaacataacgtgaatgatgccgcttttcttatctttcagcagctttttctgaccgaaaacattgaccttaaggagatcccaacgctctttaaaacgacggtcaaactcaattttttttcctaattgtatgtaggccattctcgtccgtataagatatacaaacaaatatcctgcataagcaataacagcaatggcagccagccaattaataatcagtaagctattcatttttatgctacccctctctttgtaagccctctttctttttgaatcttcaaaaatatataattttctgaattatatcccctatccccattatataatgagtgagcattcagtcaacagttttttgttatagaacaacacattttttcataaagctgtttatttcggtgaaactataaagtgaaactttaatcagtaggggtggttcatcccccactgattattagttgaacccatcgggcttttacgggcagttgatttcctaactaacttctacttatccaacattttttgaggtgaaaggcttactgcccgttaaagcaggataaagtgaaactttaattagtacaacatctatcctctaaagaaatttataataacagccgtgctacccgtatcatttgtaacatactgaaggtgaaaagaatgcgaaggagggaattcactgatgctctacttatctcttttgttaatatccgttgctctttggattacaattgacctttcatacgggagacttcttcatttaaaacaggtaagctctcgcactttccctttacgtcaaagtgattttcacctttatacatatgggaaagatttatatgacgctttatttactgatataaaacaagcacagcaccacattcatattttattcttcattgtaaaaaacgataaaatcagtcgtgaatttttaaatttgctgattgataaggctcaggaaggaattgaagtacgacttttacttgatcgatttggcagccattctttatcaaacgaagctattcgctccctgcaaaaacatggtgtatctttttcattttgtcataaggtaaaatttcctcttcctttcttttctgccaatcaaagaaatcatagaaaaattacagtgattgatgggaaaaccggctatatcgggggatttaatattggcgaagagtatctagggcataatgaacacttaggattatggcgagactatcatttacgtcttacaggagaaggggttcaagatttacaaaagcaatttttgcatgattggtttgatgatacgaaacagaatttattggatgcttctctttattttccaaaacaacaaccaggtaccatcttgcatcaatttattccgactgatggtgcttatttacagcatacttttttacatttaattaacggagcaaaaaaagaaatctgtatcggtacgccatatttcattcctggaaaaaaaattatgaatgccttattaaaagcaagagaaagaggggttcaaatcacaattcttgttccagaaaaagctgatcaccctctcgttcgggaagcaaaattcccgtactgccgaaaattaatacaggctggttgcaatatttatgcatttcaacaagggttttttcacgccaaaattattatagtggacgatgatatttgtgatatcggaacggcaaactttgatatgagaagtttatatattaaccatgaaataaactgcctgttatataataaacatttcattcaaacagtaaaaaataaatttcatgaagatctagagaatgcatccgtactttcatatagcgatgtaaacccgccttctcttatcaatagaggaaaggaatggattggaacaatatttgctttctttttataggaaagacaatgaataaaagaggtgtatctcatatgattatacggtttggatatgtctcacatgcaatggcactctgggactgttctcctgccaaaacaatgacgtttacaagctttaagaaacttagcaagcaagaacgagaagacaacctgtaccatgttataaagcaaaatttagagcacacaatacgtatccttcattacaatatagcgcatgaaatcccactatatcgcctatcgtcttccatcgtcccacttgcaacacatcccgaagtcgagtttgactatattggggtattcacacatgcccatcaacttaaggatagaaactctacggttttccattaattgaaatgaatattttgtatgaaagagacattttgtttaatggtagttgcatctttttctacagtagcaacacgcttatcaaatccggcttggttatcctgcaccttagttacagtagattttacaccatccacactttgctctaattcatatgttgacttgctgaagtctgttggaacagaacccttttctagtttagctttcttgaaacgaaaccttttccctttagatgcttcatttctagcaaaacgaattctaaatccccaaccagtagcacgaacatcgattttaaacgtccatgactcacgacgccagtctttagctggcacaggcttttgtactgactcactccacgatccgttgatgtattggaataaaataaaatctaaaagcacatcattttgaatgtctaaagatattgttatatctttccctttttcaaagtctcctatcttagtattatctagatggaattgataaaaggcgtctgtatgatcttgacattcaatcgctacgtattcgccaggctgaacaaatgatgtaactttattcaacaccgcgccaccaatcatcccgattgtttgaggtctttcgtttgggcctgtattgattagccagttttcaacgcctacagtacgagcctcaacctgttctaactttgtcgagattttcccagcttctgctttaatttcagttgtaactttgataaattcgttactgtctgcctggtcttcaggtgcaggtctccacggataaacttttttagttaacgatagcataggtgaagtttgttggtataaagcgcctttaggtattgattcagcttcgaatctatatacaacatttggatcagcggcatcagatccgactggaattgttaccgaaactcttttccattctccattaactgttgttttaccagcactgttaggaaagaatacttgtgtagattccccacctatcattctagctgttacagaaaatgttacagtatcaccaatttttattttccctcgcttgattaattcactgggtttaacggctataccttgccattctgtatcagtttgcgcgatagcattcccattgtacgtgtccttaataacagataggcgagcaccttttaaagataattcttcgttagttgttaacgtcttagttcctcttacaaggttgataacatcatcatcaaggttatttacattcttttcgattcgttcgatggtttgctttgttccatttgcatcttcttcaactttatttaacttttgaattgtttgtgatgacgttttgttgatttgttcaatggaactggaaataccgttaatgttttgttctgtttttactacacgatctgtaataccgttttgatcttttttaatatcggatacagtactttgtagcccttcaacgccttttgtagtctcaacgattgttttgttcatatcttcttgagtaccttgtatacgtgtgattgtttctttagttgcctcgtcactttcttcaagcgccttagttacctgactgactctttcttgttctcctttaacagcattgaagtctttttgtagattgtctgctttcgtttcagcttctttaactctagcatctagcttttccgcactagcattaatatcttttgtcacctgttccaacgtttctttcttaactgaatcaacatcaggtacgaccgattcccaagctgcgcctgtccatattttcaaaataccaggctttccattgctaatatcacgccaaagtgtcttataaggtctaagccctgttgtcggtggattctttgcttcaatgatgtctaccgtgttatttttaagattctcttgtactttttcagccaatgttttcgctgcttcggattctttcttagcatcactagctgtttcatttgcatctttcactaatttatctaactgatccagtatttcttgtttctcaccgaatttactaaggattcgattgtaaatcttttttaattcctcgttcggatcagtaagttcacgataatcaccaaacacatatttatcctgtgtaggatccgtaaaagattcatcaccagcaattacacgtgcttctaggtataacttaggagtgaagcctgtatctttgattcggattgtatcaccctcgttaattagttcatgtgctagtccgaaaatacgtccaatcgattgtgcttctactacataagaaacggaagtattgactcgtttccttaattctgttttcatgagagtcataagccgctctggtgtcatattttgatcttctgtttctggagtgtagaaaccaaatttatgtttaccatgcgcattccatcgctgaaatgcgtcattatcgacgatgtaaggtagtcctttatttatgctctccaccgtgataagtttgtcaccttcacctcgtacaaatccgacaagtgctgtgcaaatatctctagaatgttcaattcttctaacctcaactaaatcttttcctagagttacttccttgccagtttctcgccctcgcttctttatcatatctacgtaccagccggtaatcttggaacccattacttcgacgcgatattggatttctaactcaaacaaagaagcaattttctttaaaaaagtgagaggatcaataaattcgtcgatagtcatagtgtggaatgaagaataatccgttattccacgttgccattttgaatcggcaagagcgatatcaataaacgtattaactgtttcgctctctatacgttgaggtttaataatcccatctttcgctatttgaacccaagcaccagacgagtgtacagttaaagatctatcatttgaatctttttctacttcattgttaataacatacggaacaatgcgaccatctcgtacttcctttaaaaccaagttctgctgttgtaatgtaattgcatgtggagtgccgtcaaaagttgtaaaatcaaatatatcaatgttatttttgatttcccaatgacggttatcagcccagtaatcttttggttgaatagctgatataatttgatctgttttaaaatcaacaacatgaagtaatccacttggtgttctcatctaaaacgctccctatatgtaacctttgctgttccaatatcagatggcataatttcgattatattagcacctttattaataacaggaaaattactgaaaaactcttttatgttaatcgcgtttttcccttcaatactgacgtgagtgttctctgtatcgatcactactttatcaccaacatcgaatatataaggtggtgtattttgattatttaaatttactttccaaaatttcaaatcagaaactgtcatcgcttctactggtggtacatcttgccactgcatgatactaatctggatttgagctgctttttccatatgcttattgtctttatcagtccatctcgcaaagcgttctgaaccatctttttctgttccaggaagaaattttgaaatataagcctcccatacatttccggtcctagcaatccacaacctaccataatactgattccatgtatttggataatcaccactctcataaattaaacctgtttttcctggtttgttatcgtatccaataaccatcgttccaaaattttgttcggcttgccaatagagatcgttcatggcaatttttgaaagaactttactgttttcatcgagtatcgctatctcaactcgtcccatttcattgattttcttgctcttacaagtaacgtaagcttgcatgataaaatcttctactgggccaccagggatactttttttaacagctgcaccgtgccatccttttcccgttccaaaatcagaacaataaaattgatatttatctgatttcatttcaccaaccggttccccatcttccattgagctgactttactccatccgaccgtagtggccatttcatcccatataagcctttgattcctttctacaggcttttccacagtttttagcggcatcccaatacgaaaataatctcgatcacttaaagataccccaccaaaccatacatctaaaaaagtgttcggtttcgtaatttcaatctcaattataggattagaatgaacagtacctttattttgaacatttgctattaacccacgtccatccatttcaaattctaccgttttagtaggtcctaacttatatggcatttcacaaacaaaagtaaggactccttctcctaaattcactaattgctgtgggtcaaacgattcatcaataagggccaaatacgtgcgatctttttcatcatcaaagatcagttcttgaggttgatctgtaataagccaattagctatttcttcctttaacttttcagcctcttccatagattcataaaataatgcaaccggtataattatttttctcatttttgtttgtgttcttatcaaacgcccacctggatagtgagggacttcaaggaatgtacgttccaaaggagcccatgcagggcgttttttaccctgcaatgggattacatttgaatttcttttcccgttaaaactaaagaaactgattccagtcatatcatcacctacctaaaatactttcaatctttctttctcgctttcttgaaacttactaacatctgagtagatttcctttgctatttctctgccgtttaaattaacttgcaaaatagttggaccttgtgatgcatattgttgtgctccagcttgttgagttaatggtagagaccccattattccgttagcaatcgcgtcgaatgtttgtttgcgaagcggtaaaactgtttcatcatatcctcttgcatcaccaacaccaatcaatgtcggattacccggtttaattaaagcgccattcgctgcccatttgacgtcgaaagatggcaaaccttcatcagcccaacgcgctgggtttaatgatccgtttatattaatcttcggaacaggaatatgaacaccactaaacatgttcttaacgcctgttttgattttatcaatccactccataacaccttcccaagcatttttaaatggggttgcgattgcatctttcacttttccgaatacttcttttatcactgtaagggtgtctcctgagcttttaaaaataccctcgaacatgtcagagaataccttctttacaccatcccaagcttctccaaacagccctttcattttgctgcctattttgccaatgatgccaagtacctttccaacaccccatatttgaatgaaattccaaatgaattcccatgctcctgataaaatctgtttaatggcatcccatacgccggtccaatcaccagtcagcaaggaagaaaatagtttaattgtccctaagatgatatctaaggccccatttataacgccttttatgtttccccatacatcttcaataatgaatagaacaacaggcattacaaattcaataatgccttttataagatcaaatgcattttttacagcttggacaatctgatccccgttttctttccaaaacgccgcaatctttgctataatcccgttcacaaatgacatcacatctgttaataaaggcattaagtaaggagctattgtattgaatacacctttaataaaatcccaagtagccccgattattcccataattacaggagcagcagctgagattagagattgtacattttctataaaactacttaattgggcatgtacatcctgaacgaacatgataatatccactttttgttctggagaaaaccctaacttatccaataaattactagcagctccccaatcaccagatacgagagctttcatagtttctacaccatattgcactgccgctgtagtttcttgtataaactgaattgcattagctgaaaaccctagtttagtaaggatgtcataaccttcaactagcgcattcctatccccagttgcagcaatccagaattgctcgatagcagcgccaacttgttggatgattccaattgcatcacgaagtggttcgaatactttattcatcgcttcttgacgttggcgagtttgctcaataccctgttgaagtttctggtattcaacttcagattggtcgaggattttattggcttcttcttgagtcatggtcccttcctcgaccttcatttttaactcttcttttttctgagctaacataccatcggcattcatcatatcttcagcgtgcttcttagataaagcaagtttttcattatactcttcttgcgttatcttcccttttttgagattcatatcaagaatggctttagattgagctaactgctgatcagtttgttgcattagcttagctgcttcaacagctctaccagatggatcaagccagtcagtaagagatttaacagcactatttgttccgtttgtcattgcaacaagtgctggttcaacatgcgagaaaacaacaagtcctaaattttctaattgtgatttaacgccatcaactgcacctgataagttatttgccattgtttcagccataacctttgcagagccttcagcagtttcgagggtatttaccatatcatcaaaggcaggtttaccacctttaataacttgaatccatcctgcatacgcttcttcaccgaagattgcttttgcagcagcgatttgttgagcgtcagttaacttcccgaacccatcgtgtaattgaccgataatttcattcattggttttaaattaccttgtgaatcctttacagttacatttaatgctgataatgatttagctgcttctttcggcggggcagctaaacgagataatccggcacgtaatgcagtaccagccatagaagctttgataccgttatttgcaaatatttgagcaattgctgccgtttgttcgatgtttaaaccgaatgtagcagctacaggagctgcgtatttcatggtctcgccgagttgttcaacatttaagttggcagtcgcttgggctaacgcgaatacatcggccgctcttcctgcttcagaagccttcattccgaatggtgtcattgtatctgttacgatatcagaagcctttgcaaggtctaatgcaccagcagttgctaaatcaagtagtggtttactagctgcaatcatttggttagaatcccaacctgcgagagccatatattcataggcctcggctacgttggtagcagaccatctggtatcagcaccaagtttacgagcgttagccccaagctcagccatttgtagtccgttcgaacgcgaaagagcttctacctttgacatttgttttgtgtactcagaaccaacatgaactacaccagcaactgcggcaccgacaccgacagcgatgccgactaatccgcccatagctatagcagctccaccaacagaagaacctaaaccagctgccgcagcaccaacttgaccaaatccacgacctaagatacctgtggtcctttgcccgcttctttctgcattagccaatcctctttgtaactgatcatcctttaagaaaattgacccaaacatcttaaataattccatttattcacccgcctttccgcggatttttgcaacacgagcaaacacttcttcttttgtgagtttctgtttcggtgtttgttcgattgaatcgttgtattgttttacctgttcttgcgttggattttcgcgcttatgtttaaattgagggaatgtttcattacagtacggttgtaaggcgcaccattcttcccataacatgcggtccatctcttttttctttgcggtgagatacaaattaataactatttctgcatccaaactctttatgtactccatatttggatagcgagaagctaacgtatcgatgaagtctatttcatcaagttcaccgcattggaaaaaagcttaaccaatccaacttctgaatctttaattgcagtaaacaacttaactaactcttctaaatttaaagttcgtattgtttcccaatctggagatgtttttttatcattttcatcttcatgaactaaaagtccagctacaaattcaaagaattcttgttccgcttcttctaatccgaaaataaacttcatgataatgtcgtacccaaaagtctcttgtgcagctaatacatcagcttgtgttgcgccttctttatttcgtacgcccgtcattaaatctttaagtaagttaatatcaaccttaaatttcgatttcttcaaaatacgaactacagaaaataaatctccgccatgaatttgtctcactttgtattctttttcttgaattgcaatagtcacatttattcctccttaaaataaaaagagcagggattttccctactctttaacctgctggtattaattcagctgcttctgttgctgttaaaatacgttttttccatggtacttttcgaatgttttctggatcacgatgtcctgtgaatgtcacttctggaacaacttcactttcgttttcaaatcctagctctaatgaaccgtcagataatgcgttatatacgataatttcaacgatatctccacctaaagtttcgccaacccatgctacgtttttaagatagctatcttttgttagacgttctgtagcttcaatcacgtcgtacttaattgttttcccgtcttttgtaacagtctcttctgatacttttaaacccgcaataaaatttttgattttttctttatccaaaaattcaagtgtcttaaaactaatttgagtttttgattttgtaatacgtttcatccccatagtgtcacctggagaaccatcatattcaatctctttaaactctggttcgtatttaaatgagccaccgccttgtgtagcgcctacaggaagttcgtctttttctccataattaaagaaaaatgcaccccaatctccgaataggacattctctggttttggttgtggagctgccatataatcaaccctttctattgtttaaaataagttcgtaaaatgaatcgcacttctttgcgtctaatattcgggtctggatcaggtactttctgacttgaaagataagaaatagcagcaccaaattcagcgctgcttaatctttttctatgaagattgttttctagtttcataatcagttcatctattttactaagatgagcagaagtaccgtaaatatcaattgtaagcatgatattcttccgtccccatggttctttatcatcgttaactgtatacaccagataaggcatttcagccgttgttttcgcgatttcatagtacgtgtctttatgaatctttttcaattcactgtgtaatgtatttataaagtcattcatggtatctacctcattaatgacgaataggttcgtgttgcagcttgcgtaatcatcggtttattattctccgctgcaggtctaaggaatggttgagcatgttgcccttgcgttttaaccattttccccgtttttgggtcacggtacatccatggagttttcctcccgtcaccatcaaccgcatagactcctgtgcccttctcgacgtatatgccatagtcagcggatgtaccaataacaaccttttctagttccgctttagaactaatactgcttcttaaatttccagtatctacagcagctaatagtttggctttagaactaacaaattgaccaacagcagtatgagccgctttctttgcagctaaatgccttgccataacagcagctctatttgattggaatttcatgctcatatggcaacatctccaattctatttgaaaaaatctacctgcattcattggatcaccgggataagtaacgctgtatactttattatcaataactaatctatcttgaatagttacgtcaaatggaaaacagtaaaagaaatgtgtactttcctcttctactttcttattacgtgcatcctttgtcccttgaatggcatctagtacaccttttacagtgtttattactctccattcttctgtaggatatggtccatcatcagaaccatcattacgaagtactgaagcatctttaccaaacttacgaatcatcgattgaatcataagacacgtagcctcactttcagccctttcgtaatactagcaggataatctccaatatcatcataagtaacagagtagttacctaatgattcacttttcttcccttctctctcctgttccttatactgatgaatcaccattttggaaataataccaggataagcaggaggaaactcaggtatttttctattcgtatactcagcaaccacaagcattgtatcttcaatatccactaatagattttcaggtttttcattaggcagctttatttgtacacgctttaaaatttctattttcatatccatctaatcacctacttgtgtaaatgaaaaagatgaaaggcttattaagcccctcatcctgctggtggtgcagttggtgtagttggtacgattgtagccgtaagcactgctagtgattcttgacgaagaatatctccaccataaaccataaggccacgaataccatcagcaaatgcaccttgtagacgcattgcttctgtttcatctaattgtttaccatacccaatagcggatttatgaagtccaagaattttatatttaccaccagatccatgaacttcttcagacacaacgatttgtgaaccgttgataatttgaccttcaacaataccattttctaacacgacaggttgtttagtaaaacggtcatccttagataacaatccaagaacttgagagttaataattgtgaagcgttcagttttaggtacttttttaatgtttaaaattgtatttaagtcaacgatatagtcgtaagcgttttttggtgttaattcaattggagatttatcgctaccgattaagtgttccttaagagcttctgcatacttacctaaaataaaggtatcaactgtttcctgaagtaccgcgccagcttcttgtgtatgcggatcgattaaattacctgctgcttgtactgcatctacatcatctactttgaacgcaaagtactttttctgatccatattaagttctactttagaaggattcgtgtcatcccattctacttttccttcataatcttttacatttactgccccgacgcggttgaagataattttgttaccttcgatttttgttggttttgttgtgattaaatcagcgatagaacgcttgtggaagttcgccattaaacgcgcttcccaaattgttggaataaaagttgctactgacatatattaattcctcctcattatttccatgttttcatatctttttggatttgatcccagttttcgttaatttcagactggttcattgttgctacttgttgacgagtaaacacagcgccactaccagaaccggcatagacttcgcgccctgctgctttaaacttctctgctactttagcttctaatgaagtattgaataactcattaagcttcgccacacgactttttgtgtcatctgcatcagcaccgataacaaagtccacaaatttgaggtctaatcctacttctgataacgcctcagttgcagcccactgcatttctttttggtgtaataccttttctcgttcatcattttgctcttggagttgtttcatttcgtattccgctttttcttgagcggtcatagaagcagtacggaagctttctaactcttttttagtagcgttcaattctttcgtatacttggtacgcactttgtcttctgctgattgaaccattttctcgataaacgcttttgtcgcttcatctaactgtggttcttttgtgtcatcaacaggtggtgtttggtcatctggtggcgtatcatctgcaggtggtgttggatcagaaaagaattgcagatttgataaacgtaatggtaatttcgttacttccttttctttaaaaaactgtaactgcttatgtttttgtaaaatattcatcatttttcctcctttgagttcctatgaatacgccctattaagttcataatctataagccctcaagtgtttttatttgtattattcaacaatcatccaatcttcagctaaaatatcagatacacttggaacccacatcgcatgagtgccatcagcacaacgtaattgcaagtaaggtcgtaccttaaataaatcaccttcatttaatccccaagcttctgccgtttgtttattacaaggaattccatcaggatatcctttttgataaacagcaaacatattcttaccgttccaacctttacgtgacaacttattgccacttttcattaattcgagtgcttttccaaaattcattattctagaccgtccttccattcttcataactaactgctgtaataacttcattcctacctgttgtcgggtttctagcccttctctcaataaatggactaacatccgctacttccgtaatgaaagtacagcggcagcgtacaacctctttagcaggtaaattactatcgtgtggatattcacaactataaccaccaactttaaataatcctttaaacggtactttttgatggtctgctgcttggtgagtaggacgtgtacgtttatctaatgtagaaatccaaatcttctccattgatacaccttcgtcaaaagcttgcgaggcactgtcataagtacctaagttttgtactctagcactttctgtccatgcaaccatttgtgctttcttcgcatccccatcaagaataggcttaatacgattagccattaccgcatacccttcaccttttctaaggccgatggatagttctttacgtattcggctaattatctgtgctcgatgagtacttaacctttgattgagtgtcattttatcgataggcatttgtaccgctcgcttaatgacgttcgggtcaatcagcccatatgaaagggatacaccaacctctttttcgataagataactcgtataataaaaagactccccatattgagtggagagtgtttcattgagagttttctttttctcataagttatttcattaataacttgctgtagttcactttgcaggttcttgtatcgattaaatcgacgcatttcctgcatacttaactgctcatttatcgcatatttagcataataaaaagccagtattcctctgacttcttccaaagcatctttatacaggtagagaatcgccttttccagctcgtcctctatcttttggaggtgtttctgcttcttgtcccattccatcgttttcaccgcctttatgtacagtgtctaaatcgatagaatcaacctcttcttccttcatcttttgtaattctgcctttggatcaggaataacagataacatagataatcgtgtttcttcgcttattaaaccctgtaatttagactgaacatcagcttcatcagataagtttgctggaaggttacgtgtaaattggaacgtcatgcaaaggtaatctaattcttctttatttgagcgtaaattccaagcgtcgaatagtaacttaaattgttgtcgcaatgacttagtgaatttcatttctaatgtaccggattttgtttctaacgatagcaacttataacgaatagcaacaccagtaaggttaccaccaaacgattcatcagaaaggttcacatgcttcgtgaatcggcatatattcttttctaacctgtctagatgatgttctaaaatgttgtcattaaggtccttagttaaaaaattagcctcgccattctcgcctacatccagagctccagtttgttttaatttctcaatggtatcatcatctatatccacacctttgaaaatcatataagccaaacggaactgctcaatctcactatttacatcagagatagccctatcatatccctcaataagagaaatagctttatcgacatccccctgcaattcttcattgttaggaaatccgataagtggtacacctttgtataaattagtaattcgatttgtttctttcaacttatctaaatcttcaccagtgtactcaatgatttgcgtatcattgtaaaattccactttgtatccgtctttgaaatcatcaccatcgattactttgattggatagcagcggatagcgtatttaggctctgcaatgcttgaattagtaagaaatattgcttcataaggtttgatattcataaccttttcaattccttctttgtcatggtaaagcagtctcgctccataaccgcaaatagaagcaaactttcctgtttccgcgtcagcatcttcggtatgattcgattttaaaaagtcttggatacgcttcaatacttcctcgtcttcatgatctagactgtatgaaataggcaatccgaacatatatcctatttttgtatcaataatttcagaaaagaaatcattgtttagcttgttgttaaccttgtccttattcccatcacctttaaactcacgtgtgaatataggtacgcctttctcacttgctttgtaacgctcatacctatttatcatgcgttgttttagtggttcaaactcatcaataatctttttgagtagcttaggtgtgggttcaccattttcttcatccagtaacggaatgtagtgttcaaacatcgtctcacctccttaatagattgacttaacagctttcgctttgttattagttaccacgactgtatttacaaaataacgatcaccatccatctggtggtcattttctttattcggtttatcttcaccacgagctgtagctttttcatcccaagtataagaagcgtattcacgaaatgtttctttacagcagtcgttgtattttattttctcttcattcagtagtctcgctacattacgtataccatctataacttcattcttagctttaataactttgaaacgattcttctttaataaagcgataaatgaagccgctgaagggtcaactataatcccacgaatagaaatttctccgacaaattcttttagatcatccagatactcatcatcagttttttgttgcgagttcttacgaccgtcataatgatattcttttgttttgtaccatataccatcacataagccccataatccatatgtcatagggttttgtgtaccatagtcacaagatacataatacttctcgtattctctttcttttgtttttacaacatgtttttctttattaaacatgtcatatacaatgccttctgcaagcacccacagtcctaaaatgaatcgttggaagaaaactccgctatacatgcgatagtatctttgcttcactttttcagataaagaaagattatcgtccattgtaaaatgaatatgtagcaggttcttgtcttccttattatctatccattcgagtttgaaccaatgatacggaccggcagggttacagttaaaccaatactttgagccttcgatagaacatcgtcctgttgcctggtttacaaagctctgtggcataagagcaacttcatcaaaaaacataccagctaatgtaataccttggataagttcttgtgatgattcgtccttaccaccgaatatatagaaatgatttgtgtggccatctttgctaatagtaagcatattatctgatagatggtccttcactttatatttacgcgatttcaacattttctttaatggagtaattacgttacgtcgcagggatccaattgttttacctgccatacctaaattctctccattaaatgtttctgttccccacataacataagaaagagccatcgatacagttttgccagcacgaatagaaccatcgcatataatgccgtcatgctccttcacaggtgaatcttttctccaccaagtaagtacttgtaattgtttcttagagaatggtctgaatttaaaaggagcaggtttaagtttcatcttcccacacctctgctgttttaccttctaatgcatcgataaatccatcatcttcatactcttcaccttcatcacctttaatgcgagaagtatctgctttaattttatcaatttgagctttttgcacttccatctgtattttgtggcgttcttcttcgattttccgtttgaaattgtcaggtaccaaatcaaagtactgtgatagtttgtccagtgctttcatcttgtcagcaagttttactgacacaccatcttttccaagctttacttcggttattatagaaccatcaaccatatcagcctcatgcaagtctacataattgataatacgagttatttcattacccgcttcatccttcatagggccgaacatccccattacaggaacttccttctgcccaaaggtcacatagttagtaatgtcagcaaaagcaatcttaatgtactcttttagtacatccatcgcttctacaaatacattctcgactaactcacctttaagttcttttatataagaggcaacgcgttcacgtcttaataatcggctagcttgtacatgagcaccatctttggagtaaccagcctttaacgcagcttgtgtaccattgaagtatttcacataatacaaacaaaagagccgttccttttcggtcagctcttcatcctctaaaatctcttttaatttttctttcgttttgggatttttaacattggtaacgctcctttttgcaatagtaacgttaccattcatttgctcatcccatttatcttgtgatttccactttctgatttgcgaaggtttgagatttaactctgctgcaatatcaactaatggcttctcacctttacttgctttatatatttcgaatgctttatctctatctgggctacgttgtctagccataaccaccacctcgcggtaatccctaatttattttacgaaagattcaaattactcttttataaatatgtccaagttgctataatagagttaacattgtcatctggaaaagtaattcgtccccaatacgagttacttttcctttttttatggctacttttctaagaattcatccaacgttttaccaagcaaactaatcatcgcttctctcttttgctttggtgttgtattatcttgcatttcattaaagataggaagtacactttctaatttctttttatcgatgcgttcatttacaacgtcctgtcctaacattgaaataaatgtaccaattacaacagcttgttcttgtttatctagtttcatttatctcactccctttaattacgccacatttgattgaatcagctgtatgttcgacaatagattccgctacaactcttccatctaatgaaactccaactttacaatccataggaatagatttactatcgttactcttcttaattatttcagattgtttatttattaattgaacatgagttatatccgctttcgttgctaattcctcttcgaacatagttacttttcttgttaatccttcaatcgttcgttgtaatccagtaacttgtattcttaattcaacaatttcagttttcatttggtagttttgattatccatccttcatcctcctccaaaataaaaaatagcacttattccagcgctaacatttctttctcgtgcatttcttctaataatagccacagcataaagtaaccttgtgcaccagcgacttttctaatgaattgatattgttcttccggtttactaactaatgatctagaaaccttataaatattttcttttactgtcttccaatcaatcgcacctaattccttatgcatatctgtacaccatattctcgataagataaaacgcatacctagaacagcattagaagcattgattttagaattgttagcattcacatgtcttttgacatcatcggagatttcatcaaaatcaagtttgaatgtttcgcatataggactaagatacttaaaacttatttcattaatatcctgttccattaccatcactccctccaaaataaaaagcagtatttaatcgtttacatcagaaacaaattcttgcgatacatcttctgcttcacaatagacatctaggtcggtccaataattttcatcataacgatattcttgtaagtgatctgtaggccatcctatttttttatgcctagcaagaacttcatcataatctttatttctagcgtcttctctaaatcttctggaagctagctcttctgctctctcgtggttttccgcaatgacatacacatgtatttggctatatcctgtatatccattcgtcacataataaagattcattttctttcttttcttcatatatcgcttctttttcataaaaaccactccaaaaagaatcttattttgaaaaatccataacgaaaactaatttatgcagggaaatgaatagacctaacagttttagtttacataatagttattatatgacagtcattaacatgggaaatacgcatggttgagcgattcttgttttataccgttatacagtttttatacatcgttgatttaacagcattcttattaatcgttaaccctaatttcttgcataaacttcactatgttaactatctgtattttaatttaaaattacccagtcatttgctaacatatccgtttgggatgcgagccagccaacaacaattgtattttgtgcagtcttcattgcaatggtatcaacaaatgaaggttctacccctacatactcgccgtatccatatcctaatcccttagacaatttattaccttcaataagatacaaaaacatatttttaccgttccatccttcacgagctacgtttttcccttgcactagtgccactatcgcttgtccaaaactcattattcaacaacctcccaatcttctgctaacatatcagcttggtacgcttgagcgggtacaaccccaccattatcctttaatacagcgaatatcatatcgtgagtttgaaattcccttacatatccagcgttcagttcttcttttacctctggattcttggagagaaaccaatatccaccccaaatagacctttttacttttttaccttgtttcaacgcttctagagcttgaccgaaattcattattatttcctcctctatttccgttcattgtgtccatttgttttctaaaatgcaacacgtttgcgcttatctttccttaacaacaaacaagacgcccccagatcacggaagcgcctacgataattgctattggtttaattaaaactgtcgcactctaatactctcattttcttgaattttagaaacggattcggcaatcgtccccccatttaaggtgacaggaacactcatcattccagcactcactattcctccccgcgctaaacctgaaaatttattagtcaatttctccaatctctctaatgcagcaacacattcattggcagcttcagttacttccttcatttgttttaacgcttctgtcgtatcgacatcaatgttaatctttaatttgttattagccatctacaattccctccgcagctttctttaacttctctatcttttcttgcgcatctttaggaagaacgctcattttagtgcttaattccttttttaaatgatcaatcgtgttgactacaccttcaattctcatacataagtcgttaattactttttgttgatctcgatttacactatctaaatcattaactaatttttctaatcgatcgattctttccgcaagatattgattatccatccttcatcctcctttttaagtgtctaatttgtctactatagctgtatacattcgttatccatctaacatagttaaacgatctttaatgtgtaatttttatataacaaagaaaagcacccattatggatgctatagttcactctttaaataaggaatactaatgattttattgttgcttaatggtatggtgactgttcttaattccttaacagctgctccatcacttaaagtgctatttcttaattgtttctctaacaattcgttgttcgctataattgttatttctacattttctttattactcatatcctcatcctttctttaaaaaagaaaccgccactattaaaatgacggttcttttacggcttataaaaatattaaaggggatgggagaaattcacgttcgaacataaggggatatgtctatgtgaatcgaatgccaagatcactcttaacattctctcagccactgcattcccgtattcttagctacgcactttacgttcagtgactgagagaagactaagaatagtcctccctctgaataggtatagtcaatacttcggctgtcgcatagccttcgttgaccgatatcgaattataaaggattcatatcaagacgtttgtatttcttccgacgtctttttaaataggtggtgtacttgttttaatttttactacatgagaatcaacccctttattaaatgatttgcagcaatgagactcgcaatatcccatcgcttattgtgtattgaaaaaaacatccctatagaatctatatacgagcaaacacttggtcacccaaaacagataccatcggaacaggtctcggtaacctttcatatatagggggcatttgtaccacaaatttcgacatttttcgcaactaaaatcaaaacatgcagaagagactttcatttattctttttccaatcttcttatctgctctttctaaatggttttgaatagtagtttttttcacccctaaataattagatattttttccatcgttaaaccatgacctctagacattacatatatttccttttctctatccgttaaagttgataatgcatcttctaactgcatacggtcccattcagagataacactttcttttgctgctgtatcccattcatatactggcattacagtactacgcacatatctttgcattaataatgggtcacatggtttctcacgttcatatgccgccctacgttcaattcctctttttttccctggctgtttagcagtacgcatccattctagagcgtaattaatatcactgatcattccattgataatacttatatccttttctgttgcgcctaccttagaattttctaattcttttcttgtttctatatactgctgcattaattttttcatcagccaggttcctccttttatataaaaagaggacgctgaattgtatacaggaaaaattgctttcctacacacaaacgccctctgaatgcggactattactttcattgtttttttatttatcattttaatacggtaagtgaaattttaatttaatcctcttttttttagctgctccgatacatttttaccatctgcaataccaaagtatctagcaatagctgtatacgtcattccgtcttctctcatagctgcagctttcacacaaattctatcccattcttctttcgttttcctttttcgcttttgcacttcttctttgccacctagaaatgcgcctagttttattatttctttccctatggtgcaatttgaactacaatgatccaattgctgatatctatactcacaatttttacaatacttatcctgcatatttagaactttgatacgcgcctctttagcattcatatcttcaccctctattactttaactaatacttggccattctaacttatcaacataatataggtaatctactaacgcacgattagttggtgttactaaatatgctctctcatcaaatacttctctttttattgattttggaccaccattttctgctgctttcatatactctttaattagcgcaaatggaactaagaatatagaatgttctttactaaactccaataaaatgaaacaaattgctcccatctgctcagcttgtagtaaccatttgtattggtgaggctttatattacttaaatcaaagcgtttttcttttatagtagccttggcctcaaatgcaataaatcgacctttatatatcccatcataatccactgtagattttttctcgtaatatccttctttaattcttccatccctatattttttcgtaactacaacgggtgtagctcgtttttcaattaatgcaatttcattatttctatacatatcgtttgaccaattaattagattttcaaatgcaggtccatgtgctccgctatatgccatttatatcagtctcactttctattaaaaggattattttattaagttatgtttttttaactgaaaccaagtctccatgcctcttacgtctttctcataaattggcattacatatatctcttcgtttattaacagttggaattctacacattgtttttctctgttccatccgtaagatgccataggaaccattttaggctccgctttttctgtcattttctcttccccccctgaataaaactcaatattccgtcaatactgtagacaacccattaagttactttctcccagttcccccttggagaaccagccgggcagttagcttttgctagctgctcttttagttatttgtatcttcgaatttcgcttttaaacgttcataatctcgtctttcttgttcttcttgtcttttcttatattcttcttgttgtttttgatgcgctaagcgtatttcattctcgtattcttcaatttcttcgtgagagattatccctttttcatgcaatgtttttcttaaccaattatgctttaacacatatgctcttgcgttgtatttaccgtacatactgatttcactgctaccatcatcttggaattgttcaactactaatattcccttatcttttgtaacgatcgtaatagccttagcaaattgtgccatgtgtgtaaaagctatttctttcccaactaaatcctcttctttttccataaagtacatttaacattccccttttctacaaaatgaaatttttgttcaaattacgaataccatctactaaactcaatattgaatacttccaaggccctacccgccaaataaacaggattttcagctccacttgttattcctacaagaacatcacgtaacaatttatcttgttctacatgtgctttttcgctattgcaccattcagcttctgctatgctacggatataatctaatcgttcgtttagttgcttctttgttctaattggttttgccattgattatcctacctttctgataaaatgaagtttttgttaagttttatctttacattccaaagaattttttagctattttgtctgtatttaagttttttgtgcaaaaagtaagataacaaaggatactaaccgcaatatttcctataggtactaacactaaacatataataaaaatatttgggtaaatttcttcctcttccatcactcgtttcataagtttacgacttacaattacactccctacatataggagcaacaacactattgaaaataagatttgattagcaactggcaatataattcctccttttctaataaaatagcgtttttgttgaatttttattgagtttacattgaccttttgttgattttttcttcacatttaaaagaaacaaacatatggatattgtatgtagtctctgcgctcatagagatctacctttcttattaaagagcatgcttatatgtgtgctccttttcgcttattatgaaatatcgtttgggttaaaactccaactcgtatcgtttctttaatgacaggctccataaattcacataaggaatacaatattaaaaatttactcatgaaaatctgattacaacttttgggatttttctgtttcatgagacattcatctaccttattgagagcacatatacaagtgtgctctttttattaataaaactaattcaaataactattttgtattgtctgctttaatcttttgtttagtccactctacaactactcttctagattgaaaccagtgtacattacacgtagaacaaatatatttagtgcaagtttcaacataattaaccgtctctaacttattcccacaatttaaacagtgttgggccaatgtattcatctccttttctctcaaataacgcttttaataaaaattagttgaaacaacaactgtcggctctacagatacttttattaactttctatagtatctttctccattgatttcaatcgatgtttttcttgctcccttatatagcgtgtctaaacgcttaaaatcactttcagaaattaacttccaaacaaacacatcatccatcgattcttcaacatttctagtatcataacgctcccattgccaaaacatttccgatagccaatcatctaagtcagaatgcgttgtaaaaatgtacgcttcatcaccgcagtcgtcttctctgaatacaaaatagtactccgttaatatgctagtgccttttccttctctttgaacgaactctttaaaagcttcccaattacttttcaatccgccccaatctaaacttctcaccattctattcccctccgtttttgtacaaaattcaaattttgtttagtttgttcttgctgttttatattcaaaaaaactggaagactttttatgtttatcgcaagcgtatacatctgtaggaagatgcttcctgccttgtggatctctagcgaatataaaacccttggttgttgcatcatttttacatccaacataattgcatttctccactttcattcccctccaaaatagctatttttttgactgttcaaatgcttgtttctcacaatctatacacgctacaatgtcaccagacttatcgaattgataaatagacttttcttcaatatccttatttaaaaagcaaatatcacaattaaattgctttttcttatctactaattcgtcattgattttcttagttagttttacagttccaatttcttcatacggttcaacagaataccctttctcttgtaacactttcgcaatatcttgcatatccttccaagctgctgtaccttgtccaaatttaataataattgtattcattttttattcccctttaatttttctatttattttttctaataatcctgttattaagcctataatccagcctaataaaaatatgaacgtatatcccactacaccacctacttaataacaaatatttatatataatttacaatctaatccaacaagaattttcttttagtctccgcatacgttcttttgttgataaagcaggtgttgttaacgcttcttctatattccatttcaatttcttaatccgatcgtaaactgtgctatatcttaagccattttcctttgccttttgtatttgttcatccgtcaatacacgattacattcattcgcacgcttcaaagtttcctctcgactcaatggaggtttagttattgaatctattaaactccaacctctttttcttcttcccttaaatgtggttcttcctatattatttttcaaagcaatctctttcactttagaccattctgaagcttttcgaggtgattcagtcattgcaaaatctttatcccaacccaaatttctaatcctatgttctaataatttacgactaaccccatgcttagctgctacttcataatcttctggagtgacataatattcatatgacgatttcataaaacccatcctcctctttactcaatatccacttgcttgacgttcaaagttctccttatttttatctttgtaggcttgtacaatatcttcaaatttgtacccatacaagtaacaaagacggaagaaaataccaaaagccttatgcaaatgtgttagagttacgtttaaatctctatattggcaccacgcacgtttagcggttaaaatatcctgcatataccattcaaatagcatattgacgcttaatatatttttcttcataatgtattgttcgcggaacattgctgctattctacgctttaatgtatggcgatctaattcaattacaatgttcatgagaaaatgaaacccatcaactaattcaaccaacagcccttctttaggagtcccaaaccctacactccacattttaaatgctctcgtttcattccaagcctcgccaatctccactaataatgcacgaaacagcatgtctaatttgtcattacccttataaccaatgcgtctatcaagttctttttgcatttccattaattcactaatatcaaatgtttggcttgtttcttctttagtaatgatatgcaagttagttgtatgtctcattgtgcatacactcctttacgataatctttaataatggcaccattctcattaaaatatgcaatttcccaatacggattaaatctaaacttatgcggatttccatctaaaataacgtacaaatcatttttgcaattcccgacaatcgtcccttgtcttccctgtacttcgacacgcatcccgcgtttagcaaatggtattcttctgtagttacacatttttcgaaatggtgcttcttgtccaaaaagtgtactaatatctactactcccagatacttgcaactaatgaacctttcaaattgttcgaatggcatatctataaagtgctgctttttaaattgtttataatagtggtattttgctttctcttcactttccttaaacacaatatggtcacatctccactgcggaaaaaccgttgaaatatgatacttgtatgtaggagtatccattagtttccctcctgtccaacaaaggagacttttgaccaatccatttctgctattttttcttgattaatcatctccaaaggtacttctagcaaaaagcgcgccgttttgttgcaattcgtgcatttcacatgaatagttttttcttctgcgcttaccatgattccgccaatcccgttatcctccgttgtaataattggcaatacagatgtaactggaccttcattttcaaattccttttcaaccaaactagccagtatattcattccacataagcaagtaatttcaaatttcatattatttatcccctttaattgttttatatttgtaactattagtaagaccgtcaattctagctcgtccaattcccacaattgacggtctctgagcctataacacttcaaatctattaatcgatttattatcctttgtttctccaattgctttgttcacctgctgtttacttttgaatcttatcgaataccctaattgctatagctataataagactgaatattacaaaaacaattaatgtatccttatccataacggattaacctgccatatcttctgcgaaaaagtagatttctagttctttaggatctatttggaacctttcatctgaattattgaccagtactgctacaagtcccgtttcagaatcttgatgttgtacagttaaaacacgtttatcgttactaacgaagtcgccaggatggaattcgttgttttttctacctttagcagcgaatactctgcggcgttcttcccaatactgctcatcttctgttgcttttcggcactgatcagcaaactgccatcccttatctcctacactcataaccgattcgttaccccacgttccatataatgcaataccgccattctgatcgataaaagcaatatcttctactgctgcaaacattgtgtagtctttgccttcaaacgctacccattccccttttgcaataaacggtgcaatgatttccgtcatatttatattcactaaagtcactttcatatttaattcctccttaatttgtactaaacccaaaaattaacgatgtatgctccgttcatttgaatttcttttcttgcataagtcgtttttccatttttaaacttgactggtttatagaacccgtttttactaacatcagatgctctgttagcatgttgatattgatatattttaaattcatttgcatatacaaccggatcatgtcctgctccccaactgtcccaacgaccttcgacaaacttagctggatcatcacaaattgcataaatactatcttcttcattaattacgaggtatatatcatcccaatcttgcattgttttcaatccattcttaatagctctcattgcatctaacgcaccaataaaatcagcttccatagtaattaacatcctttcgttatttaagatatttagttacatattgcggtctaaatccactatctaaatagattcttagctgctgtggctcttgcgattccctagccgcgcagcaaatcctctctgcggaatcccaatgaaaacttttgtcttcacttctcttataacgccatatagctttgacataatccatgaacatgtcaaagtgattatcctgttttgtagagcgaggcagttcgtccgcgctccagacgtcgcatggaataatagccatgacatctacaaagctcgccaatcctcgcctttgttttacatgcgccttctttatatcaaaaggagcactttgtactatatctggttgttttatagaatcattcagtaacagtgtcagttgttccgtcatggtgctcaccttctaactgcatttgcagtgttgcagtgaatccgcgttctaatattgatccgataactgcattcatccataaatgagttccgatcttcctttgtaaaagtgttataatcgttagtatttcttttgtagagagtgagacaaattcacctgatttttcttggttaaattgcccaccacgcttttctatgtttaaagtaatgttattttctttcacatattgttctgccttaattagatcaaactgacgaaccttatcgcgtccatatttggtaattaacgcttttaacatgtctactaaaacattgacatctatcacttttaatttggtttccatctcaccacggcaagatttgcataacgttttttcgcatccctcaatgtgcatatttgttacatcggattctggtattacatcaccgcaaatatcgcaccattcactattgtcaaacaacgcactgaacataaatttcaactcccaacctttaattttttatcgtttatatttaatgcacttattgcatggccgctagtgcgtttatgtgtactaatgtgttataattgcaaatgtaaattctttcttaactacccatctcgcaaatgggtattttttatacactttttttgatttcttctactatcttcgaacttccactaacttcttctagatgcttagcaactttcaaaacttcatttctttctttatttctattttgttgatcactcttctgcttttgcatgtacaggtccataagttccgattcaatcgcaactgcttcactagattgtttgtcgcatagtgtttttaattcttgagcagctgtaaactcaccagaattcattgctctttcacattgagaaagtaataacttacgattcatcatatattctcgaagctttccctctaaaagttcagctctttgtacatgctcaggaagcactctgtctcttattcccaattacattcacttcccgttcttgtttacggtcatcttcatcgagttttcgctcgatgaagctaccgcctttgtatgctgctaatgctagtaatccaagtcctaaaccaaagatacacacggcattggtactctcaactaagacaatgtccattacgcaataataaatacctttttagattcaatttcctctgctaattcagcagttaaatactctttaatgttgtcaattgcttctagtttccatgcgccaccgtccgcttcaaataatgcacattctggacctttacgcattcggaatataaaattactttctggttgttcaacttcaacaaatgttctgtatggctttaataaaaccggattaggtactttcacattccctacagtagcaacgcccatttttgctacgacactttgagaaacaccatcgtcaccaattgtatttacagcctcttccttgacatttccaacaagcttgagcattaaatcacgatctgaattcggtacaaatgcagactgtaaactaatattaaaattctctacatcatggtatctttcaaatgaaaaacgcggtaataatgcttctacttgaataaaattactacgattatagtcattgttaatttgcgtgaagcaagaaacacttgttggactttcaatatgaaccattaatggatgatctccatcaaactgcgatttaatataggcaactaaaccagaaagattatttacagtgattgtttttgctgtcggtttcttaataacatgcataggttgtgttgataacttttgtccattaatctcctcaatacgtgtatttcccaatccaactacatattcaattgctgctttaatcatttttcatttccccttttctttttttagttagttgattgttgacgtaaatctacaactttatcgcctacatcattttttattacttcttcacctggatcataaaaggtttgtccaattactccagaaacaagttcttgtcctactaaattaccttcattgtcataatccataacaattttagattcaacttctgttgcaggaactaacgttgttttagcttgtaccttacaattcagtacatctcgttgctgatcacctgctactgcaatcgtaatattaattttccttacctttttagggtcggtatttgggtctgcaatgttctccaaaaccttctttaattcaatatttactctttcaaataaggccccatctgcaaaactatttaagtcaatcatctttctacctcctaagcggttttactaccgttaaataacgggcgccatccttctataaaactgagagcttccccaaaatccttttgaagtatattaggataagcattcacttggtaagcatcttttaggttcttccataaagcggagtacacttttcttgttgtagcgtacaattccttatctatcttgttttcattccatagattatgtactcgtttatttacagcgtttctaattacttgctgctgtccataatcaagcgtgatacgtttatctatatcacttctcattttctctacatcttttttcagactatcgacttctccatttaactcaatagtcattttcatattggccaggatactttcttttgcgttcatcgctttaggtttgctgcgaatatattcttgcatccttttaaactcttgaataaacttaatcttcatttgaacagcttctcttgtgttgtaactcataacaactaatgtaaaggcttcttctgtcatatcaattttcggataataacgtcctctgctctcataagttcgctccgcaaaattgcttagtgaaaattcgtaacctgcatattccatttgttttctaatatctcttagtacgtcagcgtgatttttacaaaacacctcagcaatcgttaaactatttgttactgcctttccattaacttcaaatactaactcagcatgtactggcgtttcatttactgctgctaattgatccattttactctcctcatcattcgttttttgagacgtctcatttagagacctgaaaggcaaaaaaatatactacttcatcaattcatcgatggttacttcatacagattagctaacaaagacaatctatgtaagttaggttcacgttttcctgtttctacttgagaatatgaattcctatttgtgtaacctattgtttcagctacttcaatctgtgtgaaacctttagaaagtctaagttctctgatcttttcagtgtttaatttcattcggtatcaccctttgttcgtttcgttaaattgagtatatcacaagaggtctctttttgagaaccccaaaattataaaaaataaaagtttttaaaagtgttgtcatttcgagaacatatttgttaaatttaagatataggaaatgtatttatataattatttttagtgttagtaaataaaaattactaataaatattaaggggaatataaagtatggattacaaattaattagtagacgtgtgaaagatataagaactgacatactgcgaattagtcaaagggaatttgctgaagctttagggatacagagtagatcagctgtttcgatgtgggaaaatgaagagagtacaaaatgcccatctaaaaagatgagcttagaaattgcaaaacttgctaatgtatctgtttcttatgtactaggcgaatcagatgagaagaaccctgacgtcgctgcaaaagacgaatgggaaagacttatgatgcaagttaaaacaaaatcacctgagaagcaaaaagaacttttagatcttattactaacttagttaagatatccggcgattgatagctttagttgctaccaaccgctttttttatttctgctagtatatcaaaagatactgaatcccctttctcagcactgttcattacttcttttagtacgtccccgaatttatctactacagttttattctctaatttctccatccctaaatcctccaatgtaatctttatagtttgtgaatcattcacatactttcgaagttagcttttcacaataaacttcgaacgccctctaaaatcaagaaatgcgattaccccttttggataatcgcaactctacattttatattaaattttaccagcctccgccacctggttcggacatcatagcaactttaggctcagacattgtatattctttttgatctatcttgtaattaatattaaaagtaatcatacccacaaaagctaatattgggagaatcattaagtatttcttcaatcaattcacctctttcacataagattattataccattttttgaatattaacccaagtatattttagggagatttgcgtaaaaaaggctctttttttcgataaacattctatgtgagatttcgattaattctcggtcatttcttgctaaacctaagaagagtgtctgaaactcattaagataaccttttgtttctttcattttcagtaaaatagactctgacgcttgatagttacctctcttaaattctaaataagcttgatcatcatcatccaaaatatcaggcaatgtatctaagtctcggtaatgatgaatcttcaagaaaatgattgtgctttttattcttttcttctttctttctatgtctttatcaccttcagagaaatttgtttccagaattaaaagtgattgttcaaggtgaaatttcgctcgtgaataactttcaaataaaaaagactctccgatattatataaagaattggctttttgaattataaaggcaggatttttgtcgcaaatttctaatagatcattacaaatagcacgtgccaaatcaactttattttgcatcatataagttacaattaaaccctctttaattcttgctaagtaactatcacgtttgtaattgttaaatatttttttaactttagtttcgacaggagttatacgcttgaataaccttttatattctttcatttggtataaagcttggcacatcaaaatactagttaggattttcatctcatttgttgtaatttcatttttacacgattcaagatcatcataaaaatctgccggttcatatttttcattaactttaaaatgtgtatatataatatcataaaccttcgcgcactctttgttagcgattgttggagaatttttttctgactctataagttctttcaaagaatcgaattgtctttgaaatgcagcatattcaaaagcttcccgtttattttccggttttgcaaatgctaaatagtcggatatcatctgttcttccattgatacaaaagatttatcatacagtttcataatgatctttactagataaataaaactaatttctgtttttccatttagtatgcttgataaggtactttgagctattcctaaatacaaagctaactcacagttagtaattttagatgcgaataaatcatcattgattttttttaataagttcttcatagtttgctcttttgtttttactattgtactttcttgcatcccttttgctcctcccattggaacaaagacttcgctcgttttctcaacttttttaaaggaaaaataataccacagtaatgatttagtaatatcggcatgttataatgtaaatgttactcgtgtagtgaccgaaaagagacttatggcagatgttcccctcgtgagtcgggcgaacggtgtaagagtgggccaaatcactcttacacacgctgtgagtctttttttcgttccgttttttattgttatcataataccacaaatttcccaaaattctgtcgtataatagtctgaaaactattgagaaaattgaaaaaccgctttgtatcaacgttttatgtattacatggaataaaaaatgcaattatgcatttcatcgttttttgaacctgtatgaatattttaccacaaatacgaactctcgttccttttatttctacacagactcataatgaatcttcacataacataaaggtcacataattaatcataccattcgaatatataccattattaccactcgttcgcttataattgtcgaagattataaagggcggtgaatagtcattgcttagcgaacgactagtatactttcgcaagaaaaacaaattaacacaaaatgatgtcgcttaccgtttgaatgttgtccgttcaacatatacaaactgggaagcaggacggtctgaaccagatgtatcaactctcattaaacttagtgatatatacaatgtcagcctcgataacctagttggcaggacatatcgaatgcctccacagttcgaagtcattttagatcaaatatccgatttagatacagaacctaaaaagaaagcgctcaatcttttagtcgaatatacttacttaattaaaaagtatttcatgtagctatcacacctttcattttcgcttgtaagcaattttaaattcagaaatgattaagtccatagagataatgtaacgacaaaatttacagccttttaaactcttatatttaaaatccgaagcattgacaccttagagaacattacgctctctttttacatataacccaaaaatgtaactatttggattgttgcatttgagtatatagtacatttggattttaatatagactagcggtaaaatattcttgtaaagtcagaaattagtgaatttttgactatttccattgattttatgcggttattcggaaatatgcaatattacatatccattaattgtaatgtaaaccatgttttactcgtatcaaccaactcaaggaaatgctataatccgctttgactaactgctacgaaagctcatgccattgctaacgtttgcagtttatcatccacaactagggcgactccctagattgcggtaccattccgcagcccttaacaatttgttaggggcttttttcatttctgttcgacaaaatatgacaatattataattaaatgtttgctatgataagctcggaaatcttacattttacataactggaggtaataacatgtataagaaacttggtaccttagctttaacaggcacattagctttaagcttagctgcatgtagcgaaactgaggaaactgcaaaaaaagtatctagcgaccaaaaaactgagcaaacagatactaaaaaagaagatagcaaagagtttaaagttggtgaaacgattcaactaggagactataaattaacagtttctaatgttgaaaaatcccaaggtggcgaattcgacaaacctaaagaaggacaagagtttataattgctaacttaaccatagagaatggcggaaagaaagaaatcagttacaacccattcgattttaacctgcaaaatagcgaaggtaacattgtagaccaagcgtttacaatggttaatgaagagactcaattgaattctggtaaattagctccaaacggaaaaatcactggaactattgctttcgaaacaaagaaagatgacccgaagctccaattaatcttcaaacccaattttttatctaaaaaagaagtgagaattaatctacaataattaaataggagtgtttattttgaaacgaacaactgaatttgtattaggacttattggtggtatttttggagtattaggtgctgttttagctttaatgataggtggaatgggagcagcatttgaagctgaaggagctgattctattatcgggttaggttgggctgcggtaggtctatctattttaggaattgttggatctatagtcgtgagaaataaagccaaagctggcggtatcatgatgacaatcgcagcaatcggaggatttatttgtatcttcgtattctatatcttaccaggtattttattattaatcggtggattaatgggaatcttccgtaaagataaggcttctgcatctgcataaaatgagcactcgaaagagtgcttttattatttctcaatgaataatatagataaatatggtaaaataggaattgggtagtattctattaactctctcgttattaaaattaaagtggttatcaagtcgaaggaaggcaccttagggtgtcttttctttagggaatttataaatgcttcattacgatataaagactcaaatcaatacctttaggtgtgaaataataaattcaacttgtggatatccttacttatccacaaagaagaccgtcatttatttgacggtcttctcttttactcttcttttttcaacaaagttctgctatcataaaaagagtagatatataaattgcaaatgtaaatttttcatataaattaaaaaaacaaatagaaaaaccccgacgaaattttcaaaggttgatgtaagtttgtccgcctactaaaccgatgaaaattggaaactggagatcgaggtttgtatgaacatatttaaagttgtatcgctacgtctatgatagcatatactttaaaaaatgtgaactacaatcctctattttcctatacccatttttgggcggggtggaaattggaggattttttattatgtcaaaaagcaaacgtgaccgtcgtattgatggtgaaaaagcaagtaaagatttatattttcaattgtttcagtacttattctatgaaccaaaatatagaaagctagataacaatgctcgtgtcttatattctattttacgtgatcgttacaaactatctgttcaaacttcacaaagtaaagatacatacgtggataacgaaggatatatttattgcatcgctgataacactgagctaagttatatgcttatggtatcagagccaatagctatcaaagctaaaaagcagcttcatgatgtgggcttattggacgaagaacctgtaaaagatggcgccaatcgtttgtatgtattagaaccagaattaacaactgataattggatgtataaagctgaaatagaggatctacgaaaaaagaaaaaggcaaaaaaagaggaagaaagaaaaaaacgaaaagagaaaaaagcatctgagaaagcaaaaaaagaggaagaaaaaactccacaaccagttggtgacttaaaaaacttaagtcaccaggaaaataggggttcatccgaaaacggtgacttaagaaatttaagtcacgtgactaaagaatctttagcgtatacaaaagtatttaatatacagaacgattttaattactttagtaagtatgtaggtaagagtatccctaatctcattattaatttttataatcaatatttcaaaacaactaagtacgcaaaaattgaattaactaaaatgtgtgaagaagaaaatgcagtattagtattcgaatcaattaaacgtgctattgatggagaagcagataaacctattgcatacataaagaaaactatcgctaattggaatgctgataattgcgagacattagaagatattcaaaaatacgaagaaaaacatcgtaataagaaaaatcaaaataaaactaagggcagctatactcctaaaaagaaaactgtacgtaaagaaatggttccagaatgggttggcgaggaagatactggatcatcaactatggaagacaatggacaagcttctgaagaagagcgtaaacgtttagaagacgtattaaagaaatacaaaaaagattaatgtcatataggggatgaatacgtatgccgagaaagttcaaatttactgaagaagaacaattacgatttgatcactttgttacaacagatgaatttgcagaagtattagctatcgcatggagatacggttccaaacgaaatgacagtttctcaataagaagtcaaagaaaatggattgttgctcgtttttcagagttggttgaaagaagttggtctataagatattgcgaatatggaggcgatgaaccttattgggaaggagcagtatgtttaaatcaccctttagtgaacatgctagttgaaatgggatggtcccaagttactaaagaggagcgttcttttccgataggcgattttaatgaactagtgttcgtaaagacttttattctattattacacgatttaggaacaattcgagaaaaaagaaaaggtagaatgatagtccgtccacgattacgaattcatggatcagttgatgtattaaacaatattggtcgggtcctcaacaatgaattaaatgttggatttaaaaaattgcaaagtgatcaaaaggttccaagagcaaagacagtttattttcaatctaaatttgaaatacccaagattttagaatttgttggagctgtagaatccttagataaatttaattcgcttgatctaggatctagggaattaatgagagtgtgaaatttcacacaccgtactatttttatatcttctaaaactcagtatataggggattttaaggaatattagggaggacaagcttatggcttccctacctttctacacgcattttataaatttagcgaagccattgcgaagactaacgacctcgcaaaaagtacaaaccaatggttaatcaattgtattttgttgtttttggcatattttattgaaacctagcgtaaatatctgttagaatcaaaataccaatgattaatcaatggttatgaaaggggaatgtatatgttattaggaaatccatacgcgattgacttaggaaatggctttacaaaacgcgcttcaaagaaaaataaatcactagaggcagatgttattacagaattatctgtgttggctcctgtagacgactactacaatgaagctagtttcacgaaaattgaactaacaaacactgacttcccatactacataggagaagaagctagaaaatccaaactaccattaatccgtgcccttggcgagaataaagcgaagcgctatgaggatccaacatttaagaagcaattatttggattcattgcaaaagactttaaaaagaacgttacaattccgttacttgttacaggtcttccagtatcacactttggtaatcaacgtgaatcgattcaaaaagtagctatggaagaaacagcagtaaaagtaaatggccagttaatcacaattaaagtgaaacaatgcttagttattccgcaacccgtcggcactcagtattacttagtgaagaaagaaattattaataaagaagatcgtattcttattatcgatggtgggtttggcacatttgatgttactgatatgtctggtaatgctgttattgatcgtttaggaactgaattaggctgtgagaaagcatttatggctattgaacaaatcgttcgcgataacattggtgaaacacctgatttaagcgtgtcgaacatgcactatattcttgagaatggctataagtacaacggctctctatacgatttatacactcataaagacgtagctgagaaggttgatgaagagttacaacgtcattttgatgcagcattacgtgaagtttctcaaaagttcaacttagctgtatacgataaaatcgtctggactggtggaatggctgctcttcataaaaagcgtattgagaagaaaaaagagcaattcccaacatttgcggttctagaaaacggtcaagaagctaacctattaggatactactatttaggatgtgatgtctttgacaaacttacaaaagaaaaagcttcaaattgagctaaatccaaacaatgacaaggttctgtataacttcgtaactcgattagaggaacaaggtaaaggacaaaaagggtatgtaaataaacaaattaaaaagagattagaaatgtaccaggtacttgctgaagttgcaggagaagaagatccacttcaattagttaagaagttactaatcaatataaatactcatggcatacagaatgatgcaggagtagatgaaaagccttctgaagaagtcgttgataatgctatggatttactagctaatttagataaaagctttatgtaagaaaaattttactccttcctccctcctctcaaaaacagcaggaacgatagcatgttggaattatgtccctgagaatacagaggggggaggaggttgaatttgaaaggggagagcatcatgagcaatgttaaccctatgtttagtttttctagaaaatctactacaataacaaatcaacaacctcgtaaaactcgttctgacaaaaagaaagatgtaaaaatccccgtaaatgaaatacaaagacaattaataagatcttcagcgttccaacaaaatataactactacacaatacatgtctaaattgatcacagaacatctcggaattgattatattagtgaaatacatgcgtatgaatataaggacaccaaaaagtacattcacgcaaaattggagcaaggagcgcactctaagcttgtccaattagcgattgaatggggagtttcgcaaagagcagctgcaacacgtattttatgctttgcattacgcaccatgtagggagtgagcgcatgtatagtaaatacgacgttatgacgaaagaaatacagcttatgagtgctagtaattggtgggagcgaacgaaaattgaatggaagttaaaagagaagtaccgttttgaagtgaagatgctcaaaatttacttatttcgaatgaatattattatcgaagatatggaagaggaagattacgagtgtaatgctagtgatctagctgagatacttgttgaggactttcttgaacatatacgctctaaaaatagtatggagcagctgtatcaaatcctagagagcaagaaacattatacggattttaatttggagtttaatgaaaatgacgatcgatacggtacaatttctgtaaaaattgatagacggatattaagacgaattgaagtgtttttttcggatatggctcatagtttccctatgcacggttttacagctgaaaaattaatcaatattctgatgtgtgactacatgcggttttatgctgaagaaccagggaagaaactatctttgttgaagcgaagattttcatagtgtttaaatttcctatttttgagatgtttaaaaaatgaaatctttgaccactcttgtactaagaatttaaaacaggagtgataaaatgggatggcttatttctggtaaagggagaaaatcgaagctctccaattttctggagaaaaacaaaattactcaacaggaattagcggaaagaagcggggtaagtaaatcgactattagtcgtgtatgccaaggagataaattttcgccaaccatgaaaaatgcacaaaagattataaaagcattgaagaaattaactaacaaagatgtacattatgatgacttttggatgtagctccgttaaaaacggggctatttattattagaagtaattattttgtttttggacatttttttactataaaaaaatgttagggtaaaagtgtcagtccgtcctaacaaatttttaaaaattaaaaccccttaaatacaggttataaatgagcaaaaaagtaagagtttggaccccaacttcagcgtacatattttactatcataattaatataattcatctctttatttttgttaggatggcctaacaaaagtcccctcaaaaaaagggggaatgttcgttttcctactgtatgttatgatggatttgcggttcttatttgttcaacaagccaagtagaattacctaaatcgcacactttctgaatgtagcacatccttactactcataaggtgtgctccgcctttgtataaagataaataggaggagataaacgatgcgtgatgtatatccggtcaaatattatagcaaagaaggatttgtagaacgaaaaatagagattaacgaagaagatttacagaaaatcattgaagattatttagataggcatgcagactttgattttgatgaacttgaggttgtaaataaccgtcctatgaatatttggttatacgcaaagtgtagaaagtatgtagatgaagaaaatcctgaagatgatcaagctgtacatgaagcagaattggaaatcacaggagattatgacggaaatggtatattttaaaggggtacggaaacgcttccttttttgggggtcactcacaaagtatgaatatatttaagcattgtattgggtcattgctatacatacctcgtattttataagaaaaaggatacgttatttgattaacgtacccttttttatttttttctatatttttcttgctcatagatactggctgccattccagctcggaataaaataaatgctccatgaactactaatgggactacgccaccatttgttttaacttactttacatacacataggcttcacttgctgttacatagtatgttttatttttcaaacttcacatattcaccagaaacccattggtcgccgccaacattataccaaccgtctctatatccccaagattgatatctttcactttggtacacattttttacgacaccatagttagttcctggaccagtacgaacacgtaatacatcagctgtaatagttactacaccaatgccatcatttgaaggtttagaaggagctggtgcattttctcctgtataacgaatatatgatgaatcattatatacccactgatcgccacccaagtttagccaaccatttgactcaccccatacttggtagcattctcctttacctaacttacgaataactgcatatccagttccaggtccttttcgtaaattcacgttatcgccattaatgtaagcaacttttgtaccatcgtttgaaggtggaataggagttggcattactggactacctccaccgttatatgcattttggactctttcaataaaactattccaacgtccttctgctaacatacgatgaggacaatactttccactccatgattgatgtgtgcgaactttactaattggaatattgtactgtttcatgagcccagctacgacgatagctgcattatcctccgctttataatatcgatctccaccacttagagagtaacagatttcaactccaatagatttacgatttccgttaccgccaccatcaccgcaatgccaagcgttacgctctaaaggaataccttgtacagcttctttatcgtctaccgcaatatgaaacgatacttggttatcattacgaatcatataagccacttcgttatttgctgtagcatcgttataagtattgtggacagtaatgaattctggattcattgtataagggcacttagtaccatatttgcttgcatcaactaaattttttctgatttccattattaaacatctccttttagtgtaagtcatttttttctaatacatttttttgttgtaatcctttgttgctcaaatagttgttcttccacgccatatacaaagtgaatgctcctgtaattacagcaactaaatcatttgtcattttgtcatcaatcgtttggtatcccacaagatttaagacactattaatcacagcaatcactaatacgacatagcgactaattgaagctgcatcaaagttcctcatactctcacctcctccaaataaaaaaagtgaccgtatatacgatcacttccctgcgaatttaaaaagagccattatcccaccggtgataatagccccaactactgtagtaccaatccaaaacactaacttatctaatcgatcaattcttaaatgagcacttttcgctgactgctgcgcttcaattgcaacatccttaacattaccaagtgtatctagtttggtttccactctggttaatccaactaataattctttaaagtcatcatttttttgttctgacatttattcagcctccttttatgctgcgaaataacttgggtccattccaaatatctctgcaatatcttcttcacttctatccttcagataagattcagtcgttgaaatatcagaatgattagcgagtgattttaatttttcaagtggaacaccttgtacttttaaattatctaatctgctatggcggaaacagtgaggattcattttaaattccttcccttcctttttgttcagcatcttagcaaatatatcgcaccaataattaaatacactcttgttcaatctctttctctcaccattcttatacacacgcacaaacaaatctggaatagtatccttacctcgctgatttatatataaacgaatgcatttctgcacccggtgattgtaatataatctaaacttcttaccccgttttcctcgtaccacatttgtataatattgttctgtcagcccttctttttgaacctggtatacctcattctttctagctgcactgtaataagaaagtgctaaatacgttgctaacatatatctttcttgtgctattagctcatcgattaaccactcaatttgttcttctgttataaaagtgatttctctaactggattcttaggtaaaccacgtacccgtgaacctacattaaattcataatcatagtcatcatcatccgcacaaaactctaacgcggaccttaatgcactcattaatccgttcacacgagcattagacatcctcatatcttgaaaaataatagataaatttcgaatatctttacgcgttaaatcaataagatttttatttccgaagtgttgatgtattagaaacaaaataattcgtaaatcccaaccgtattgctttaaagtgcttgccgcttttccttgtgctttcttttcaatcagaaaatctttgactaggtttttatttccttggctaacatgcttttcgtaaattgcttggtctactattcgtttcacactaatcatctcctcaaaataaagagaagcgatatcgcccctcttgatctatgatttgaatttattcaaagccgtactttgcgcaaaataaaaaacagcttatggctgctctggtttctcatttattaattgttgtactaatacctttaattcatcaatttcagctttcattgaaactttctcaagtttttctgcttcaagttgttctttaagagtgtcaacttcctgcttccacataccgtggtcaaattgaagatttttaactttaaagtcaacttcttgtattgcttgaatagaaattgcaaccgagctataaagtgttacagcgtctttttgtggtgtggtgaatacatcgtcagagtcctccgcaatcataccgtaattaattggggttgacctaacagcttgcaatcaccgtttttccttgcccccttatgggcgcacgaaatcaccataacaatatggatacctaaaattatttttatttccaccacaagtatacatcgctggattttgatcaactttcatcttagaaaactttttggctgaatcctccgagtgttgtttaacttcttgactagcaacaaaatcaatataccctggccccatattatagctttgaataattgtatccatgctaacatccttgtccgttccatatttgtacattttagcaaagtgttttaccccttgttcaatgctcaagcttgtctcttgaatttcatttggctttaatccaagtgattcggatgactgcataggatcgtttccctcacctctactctcttggtacataattcctaataaaactgctgttttctctcctaaattatatttttctaattcttttttcaaggtagattcatattgcaatacacgtttttcggtggctagcgctttatttttttgaatattggttttatgattaaaatatagcattccaagtattattcctaagcctaaaatactaataaggaacacttttataatttgttttttacttgtatccttcatatattcctcctcgtataaaaaatttaatttttcaaaggtaattggttatttacaaactatgtaatgaacatctatctcccgccctttttagactcaaacatcaatactttaaggttttaagtttaatataaaaatttaaagataaggtaaagataagataaagataagataaagggcattttttatacgtactttaaaagatattggtacaaaggggtatgtggggaaatttgttgatataaatggatttagtaataatggaaaggttaacgtacaaattattaataatggaggtatcattccagatgatttaccctatcttttcaatatgctttatataaaaactacaacataacatataataaaaaaacggcgaaccctcgacgtaggagaatccaccatcacaaataaatgattatttcacacctagtttttcttttactttcttaggaagctcatcttcctgcacttcctcccaagctgttacaccttttttatctaaatgatatacacgtaggaatgcttctttacgaagattcttttgtgcgataaattctaactctttttctttaccttccttatcaaaacccgataatgtatattcatactcctttcccatcactttaccatccatagattttgaaactcctccttttccatccatattaatttgaacgtaatattcacctttaccaatacggttgatatcacaccaaactaaaacacttgcaaatacaacttccttattttttacgtacctgtatatttttatctttttactcacttttatttttctttcttaactaacttatttaagataatctcatataaattacttaacgaattaatgctatttgcgacataaaaaaagagaggcgtctgccccctcttagaagtgaaattcaacttgctgttcttttgtaattgtctcatcccctcaggattaactgtgtcgctaaagagtaacttagctgatataatctcctcaagcttactcttaatgaatagacctacgctaccttctttcttcaccttcccatagaatttgttagcattctcatctttctcctaactaagatcttttacttttactaatttcatatgagaaatcccctccaaatgtacacactaagaatgagatttgatagaagatacttgtctacattttaacttttcctattaaaactggaatatttggtaaaatgtattaaacacgcaaataacttgatatcgtatctcatgattttaataatgattctgtttttcattgtagtaaggttgtttatctcatattgaattacctttcatttttcttacaggttcgcaatatttttgaaaagacagtttataaagccgagaattattattttttaagagatagcattgaggagtttttcatatgcactgtactatacggtactagattcccgtacagatttcatttacaattcattgtattttctttaccatttaccaagttaaaatggaacaaatttattacttagagtgtctattatgtgtatccctaaaaatatgaaaggacttattattccccaaagtaaagtgatgtaaaaaagtgtgtattgagatacttcatttaaatgttacgagtttaatactttcacgggtaaactataaaaaaagaaacaccctaaacagcaactgttcattcatataaacgctttggttctgcttagcctgttaaaattcaacttcagaagtatcggtatccaacacccgctttaattaacatcggtatttaaaataccaaaacaaaatccatatatcgttgaaagaggttgaaaattcatgtacgttttaaacaagttctttacctacaaaaagattgtacccgtcgtattactttcatgtgtaacactaatagggtgttctaatagtaatactccatctgaaccacctaagcaaacaaagcaaacaaagcaaacaaaacaaataaagcaaattaaacaagaaaatacaggtcatgattcttttgctaagcttgaaaaagaatataatgctaagcttggtatttatgctctggatacaggtacaaatcaaactattgcttatcattcaaatgatcgttttgcatttgcctctacatctaaatcattagcagcgggagctcttttacgtcagaactcaatagaagctcttgatgaagggattacgtatacgcgtgaagacctttctaattataatccaattacaaaaaagcatgtgtatacaggaatgacgttaaaagaacttgcagatgcttctgttcgatatagtgacagtacggcacataatttaattcttaaaaagttaggtggtccatccgcatttgaaaaaatcttgagagaaacgggagatacggttactaaatctgaacgatttgaacctgaattaaatgaagtacatcctggagaaacgcgcgataccagtacaccagaagcgatcgctaagacacttcaatcatttacattaggatctgcacttccaacagagaaacgtgaattattagtagattggatgaagagaaatacgactggagataagttgattcgtgcgggcgtaccaaaaggatgggaagtagctgataaaacaggcgcaggatcttatggaacaaggaatgatattgcaattatttggccaccaaataaaaaaccaattgttcttgccatcctttctaatcatgataaaaaagatgcagaatatgatgataagcttattgcagacacaactaaagtcgtattagatactttaaaagttacgaataaaaactaataaattaatagttttccgtggttaggggacatattctctaataagagtaaccatacatgaacgtcaaatgatgctaaaaaaagaaaaaacacgcagttccatttggaattgcgtgtttttattttgctaatttattttggataaccgcttgtgtcatccagtgctgattagtttgcacatggtcttttcgaacaaatgcccctatggattttgaaaaatcattatagtgaaacgcatccgttaatctaagtacatacccctcctgaatccctccaaagagtgaagtaccgttgtagcacgaacgaattaccttttcattataggggccacgatataacactggaacgtgtgcaaggcctaactttttacaccatgcaactgctgcatcccacgataaacattcatttttctcattctatattgaaaagacataaaaataggacgtcagtgctgtgtagtgaatgccatgacaagcatacacattttcaccacatatcctccagccttctggaattctatccccccatacttccttgtaacttttttacccatgttctcgatgggttatgaccacttgataacgaccttgcatgaatagcatctttataaagagatgtattttcaccatctaacttcgtacgattaattacttcctgtagtagcctttctactgtatctattttatctcatttggttttctcaatattctttacttctattttttgattgttataactggcactttcttagtatcagaaatttcactgtaaccataataaagtagaaaaaacaataaaataattgtccaaataaatataaacactttataactatacttcatatgaaaaacctcattttccctatataagtgaatgtacatacaccttataaatcctgttacataaattattggatattgcagtagtagagaatcattaagtattagaaattgttattcataaacatatccaagaaatcttcaaaaaatatcatctagacattttaacatttcataaaaatgcacagataatatttttacgtttagctaagtaatgcttattatgtaataaatccttatctctatttcaccttaatatttatatgtacaagagtctgtgtagcaactaggctgtactttaaatatgtactaaattgtgtgtgggaaaggaagcacattttatttaaagttgttactttgaaccctttaattagttggtagtcttcttcattcagacagaaaggaaatttaaagtgtgcacgtattttcaactcagactctttactacacacactcctatacacataaaacatctatacctttcgtaacattaaggaaacaaaaggaaatgatatagaaataattataatatttcgtaacaaccttgtaacacaaatgtaacacaatacatttaatcgtacaatacttttttagctaattatcaacaaagcattgttaatatcgttcaaatttaataatgttcccataaagtaatacatattgtttgtgaagtgttttttcaaaatataacgaaacctaccatgacggaggaatgttaattcaatttaagaataaatggattgatacctttctagcttttgtatcccaatcatagtatagagaggattattgttatccaataaatgtatgtgaacatatacaagctaagccttctaaataattactgtaactaaaaaaacaagtaattatacttgtttttttagtttactttccaatatcgcaacagttttatgtgctctcttttcctgtctacattattggatgcatatcttactaaagatagcttctttttttatgattctattgaagtaattaattgctgacgttctttatctctataaattttcatttcatgtttaaactcgtaatttcctacttcaaatctagcccattccttacttgtccaatatactacatctacattttcttttaagattgcagaacacacatccactaattcatctttgtaaaatggagcttcttttgctaattcaaaagcaagcacttttggatccttagttttaatttgaagttccctagaggtttgccctaaatactgccatggcgatggtattgattgaacttgggcatctcccctatcttgaaactgtgatggagaataatttgttgaagcaaatgtaggtttacttactcctattgctgttcctaaaacaatagaaccaataataagttttttaatcattttttcagcccctttaataattttggatatgcttcatttttataccacgttcacagtcatgtaaataaagataatttgacataattctgcgttttcctcgaaaaatgcatattaattacacaccttaaatttaccgaaaacaaaattgttggttaatgtaaactttcttgtcgtaagtatacaatttttgtataaaaattagtttttaaaatatttgcatacttattgataaagcttcctgccataccttattcgaagccaatttacctctacctactcacttcgcattccttgaagaaggaatcttcttgactaaaacgataaaaaagttggggatttccccaacttttttatacgtttattgtcttattaatcctgtagatgtaacccgatatgttcttttctttccgatatattcctgttttccattctcaaggttagttaaagtcgcgcgtgttttttcctttgctgcttccccttctatatgagtaaattctatataatctccctcttttacaggtactgtttgggtttcagcattttgttgtctatttcccataatttccttattgtacataacgctaccagatgagttctggactttaatacttgcatatgtgctattgaaataagaatgcggtacaccagcttctaatattcgctttaaaacttagatatatttaatatttttttcactactattattaatcaaattatagtattttgtattaaaatcttatgatttaggactaaataacttaattgatcacactatttgactcagaattgtttaccagaaaaacgttatgtaaactttctattttgtcaattagacaaaatagtttatttgctggtaccttatcattagctagaaagagcctactaaaaaaacgtagactcctttaggtatctaaacattacatatatttcaaacgtagattcctctaacgttaacacctgcccaattccagcgttgtttacaaggatatcaaatgtagtatcacctatatatttttgaagagattgatccatcattgaatacaatatattaatgccattaaaagtacttaagtctgcacgaatcgcaaatacggaaccgccatcttttttaattttatccactacactttctgcttcttcttttcttttactatagtgaacaacgactaacgcaccagcccgtgccaaatgtaaggcaatacttcgacctatccccctactagcccctgttactaatgcaattttccccttcaatttattcatctcatcatcccctggtttaaaaaaatctacttagttatatcacaagataccctttgaaatgttgctcactaatttgatatccataaaaccaaaaggcccactcataattataagagtcggccttttcacttcacatattcattagctttacatacagcatccccaactgttatgtactttgtactaagtataataaagactctaaatggtattataggtaaagccaacttaaactaaagttaattcatatacattttgcttagagtctctgcctttaaacagttcgtttaggattctatgcatatattcaataaaatttcagcaatgcctgtatttttcatctttcatatttttctttattagctatgagtatacttaaaaaactaaaaactatttgataatcttttagaatctaactttcttttaatactatttgctatttcttcaatattttcatttagaaagaaatgattaccttcaaaagaatgaaaagtacacgttttacttgtgtatcgttcccattttattacttgatcatatgtagtaaattcatcattttccccattaaatataagaaaatcaatatcacatggttgtgtatttttgtcatgaatatacgtctcaacgattttaaaatctgctcttagaatagggagaaaaatctccattaattcttctgattgcagtaccccagatggtgtacctcccattgcaataacttctcttttaaattgctcattagaaagattatgtcggatattttttattttactatttggatgatttctaccggacaaaacaagaaattcaggcgatacgtttttagaatcttttatttttctggctaattcataggcgatcaaacttcccatgctatgcccgaatagaatgtagggcgaatcatctatctgcataactattttattgtagacatcatttactgcctcttccatactttggtacaagttttcttcaattctatatcctctaccagctagctctatcgggactacctcaatatatggattaaagtgatttttccattttgcgtaactaaacgcagatcccccagcatgtggaaagcaaaaaagtttagtcttctgcattgattttctccttactttcaaatttgtatatattttggcaaattgcataaatgtctttaattattatctcttgcggaaattcatcccttgttgcacaagcagataacttataatttggatcaatgttatattgtttaaagtaaaagtttttaggtatattcttgtatgaaattaaagttcgtgattctttttttatagagaatgaatttaatggggtataaagcccttttccaatcgtttttatatagctttcttttaatgtccataaatcaaaaaaacaattaatttgttcatcagaattcatattagatatatcataaaattcatccgctgaaaaaaattcttttgctaatttaagagcctctatctctgaagtcttttctatatcaatacccacattaaaattagcagtagtacaaaccacccattctcctgaatgtgacagattaaaatgaaagtcagaaaaattttcaacaaaaggttttccatactcattatatttaaatctaatttcttcattattaattttatacttttggcagattagagatcggattagtaaatcccctatcagggtcctattaacgtcacatgagtttaataaacgcttcattcgttctttcttctcatttgaaaccaagttactaagttgcttaaacaaatgactttcaatattctttggtattttcacagcttgaatgtgtatgataaatcacttcctttttttaaagatggcttcatatatgtgcgttacataaattcaaattaactttattaaattgcaaatacaatagaaaaggtgcatatttacatatcaatgaaaatatacacctttcctcaataatatcatcaaagcattagtttctattacaaaaaatagagaggatttacatcattctatgagcaactcatataggtttctatgtctctatcaagtaaattttccattatcctcttaaaaattaatactcttgatatattcattattgcctacactttatttgcagttattggtctccccttttcattcatagcgttgcatcttttgcactctctacttttcagttaatgaaagggatgtttcttttatcccttcaaattcatttaataggtacttaactatcttttcaactgcggggaagtctactatttcctcatgtgatccagggactgaatacctatttactcttccttttaataaaggtccccaatctgtaaacaactcttttccttcctcagcactaaagtagataacttctccaaagtatggtatcaaatcattctctgccattaagttcaggcatttcctatgagcattgataacttgcttcaaattcataagatttgcatcaggcgggagtactccttccataattaatcgctccacaagcatatcttgcttatgaacgagcccttcttcctgctcagtaagatctctaggaatgaaatgttcagatatatatgagagcatatcctcccttgttttacgatcttgctctgaaggtactttagtatccattagtatcaacaactcaacttcctcaccttgattctttagcacagttgcgatttcataagcaattgcaccgcctaaagaccatcctccaagacgatatgggccttctggctgaacacgtttgatttcttcaatgtaaagttgaattagttccggcaaggtcaattcatcaatttcttccttttctataagaggattctgtaaaccataaaatgaacaatggttcttaagtaatcttgctagttgaatgtaacagaatacattccccataaacggatgaacacagaagaaagggcttttttctgattcttgtagtggaactagcgctgctactgatttcgtcatatcatgcttatcacgaataaggcatgcgattccttccaatgttggattcttaatcaatgttgaaaccttaatctcttttccaaacttctccctaatttttgaaactaatttaattacaaggagagagtgtcctcctctattaaagaaatcatcatttacatagacatcttctatctgtaacacatcctgccagattttaatcaactgatattcaatttcatcccttggaatgattggtgtagagaagttattttctctatgaatagttaaattgttcaatgcctttcgatcaactttgccattcgttgtaagaggaatctcgtctaccttaataaagtgtgcgggaaccatataatttggtacttgtgtcttgagatactcacgccactcatgcatactaccatctccaactacataagcaaccaatctctgctctcctaatttatcctctgttgccaaaactactgcttcttttaccaatggatgcctctctatactcgcttcaatctcttcaagttcaatacgaaagcccctaattttcacttgattatcaattcttctcaagtaatctaaattaccatcaggtaaataacgaaccaaatctcccgtacgatataaacgctcttcttcattaaatggatgacagatgaatcgctctgctgttaattctgggcgattcaagtattctctcgctatacctgcacccccaatatatagctcacctgttacaccaactggaacaggtaacaaatttttatccaatacataagtttgaacgttcggcaatggacgtccaattgttactctcttactatcttttttgatatgatagcatgttgcatcaaccgtacattctgtaggaccgtatacgttataaaaatcaatcttttcagtctctactagctgttcccataatgacggcatgattgcttcaccaccgaccaatatcttgcttggtacatgaacatcagcacttatttctagcaatcctccatctattagtaattgaagtaatgaaggtgtcatatcaaacatttccaatttattctccctaatataggacacaaattgttctgggttagtgcgaacttcacttggaataatatataaacttgaaccataaagcagcatttgtaattgctgaatagatacatcaaaggcaattgatgcattcaaaccgacgcgcatattactaggtatctcatgtgagaaaacttctttttgtaaaccatatgataggtttattacagaatggtgctgtactaaagctccctttggattccctgtcgaaccagaagtgtagataacatacgctaagttttcccctgttacctcacatattggtgaaagtttgctttcttgagaaagcattgcttggtccctatctaggcaaactgtcttaatgtctttaggaatccagcctagtaatacttcatttgtaactaacactttaattcctgtgtcttctaaaatatattgtaggcggctttccggattcgatggatctaatggaacataggctgctccagccttccaaattcccatgagaccaacaaccatctcaactgaacgctcaaagcaaaggccaactaatgactctgtcccaattccacatttctgtaaatgatgggctaattgattagctctttcattcagctctcgatatgttagttgctgtttttcatctaccactgccaacgcgtcaggcgtacgatttacttgctcttcgaatagttgatgaattgcattctcacgtggataggatatagtattattattccattcttccaatagctttctttgttcagcttccgtaatatatactagctccgatagattttgatcaatgtttttgagcatttgcattaacactttgtgtaaatgacccagcattcgttcaatggttactctattaaacttactacggtcatacattaactttaacgataactggattcctggaactacagctaaccctaatgggtagtgggtttgttctaccccttccaattcaccaatttccagattttctgaagactcctctttcactggataattttcaaacacatataaactattgaacagcggtattcctctaggaacttcactccacccctgaatctctgtcaaagaagcatactcatattgtcttctttctatctctccctcttgtatcttctgcaaccaatctattaattttatatcatccatcaattgaattcgcgtcggtgacgttgtaatgaaaggacctacgatgttttcaacatcaataatctccgtagaacgtcctgagcttgttacaccaaaaacaatgtcattttctccactatatcggctcatgagatatgcccatgcaccttgaattactgtactcaaagtaagtttattgcgtttcgcccatccttgtaacgcttgagtctgctcttctgataaatacgtaaccttctctgtgtaacctttttcttcctctttactttctaagcccagcaaagttggcgcagtaaaaccttttagcttctctctccagaattgttccgcctgctccttatcttgctctcttaaccattggatatatttcttatatggtgaggacttaggtaacttcacagcttctccattcattctcttctgatagactgtaagtaattcattaaatactaatggtaaactccatccatccagtaaaatatggtgatgggtccaaacaatccgatattcttcctcaccttcttgaatgactgttacccgcatcaatggtgcttcatcaaattggaaggcttgttttcgatctaatgccaaaaagacttttcttttttcctctatctcttcacttgtcattgtacgccagtcttctttattcactttaaatgggatattttcatacaccacttgtacaggttcttcaatttcgtcccatacaaatcctgtacgaaaaatttcatgccgctgaattacagatttccacgcctgctcaaatgtaggaatattcatttttcctcgaatcataaaactcaattgcactatatacggtgcaacatgttcatccccttggtcatgcaatgtgtggaaaatcataccttcttgcaaaggtgatagtggatataaatcagtaatctgattgttctttccgcgatgcattttgtttagtacatttgtcaaaccttcttggctaagattagccattgcaaaatccgaaatggtcagtgcagattctctatctgaaaattgaatcaatgtactcagttgatatagcatattctgtgcaatactttgaatcgttgatttggaaaattgtccaacattgtatacccaagtgaactgaagttttccatccgttacaaccccaattacatcaattacatgcgatcgcttggaaccggcagcatgatctaaacgcttaaattcgttctccggaataaacattgcatcgctagaaaacatttggtcaaattgtccaagatagttaaaactaatagacggtgtatattgggagcttaattgctcacacattgttgcgttcatgtaacgcaacaccccataatcaacacccttattaggaattttgcgaacttgttctttaactgcttttaatgcttcaattggcgtattagcactagtaatatttaaatgaactgggtaaatacttgtaaaccatcccacagttctcgataaatcaacatcttcaataatctcttctcgaccatgtccctctaaatctacgctcaatatcggctgccccgtacatgctgccgtagcttgtactaatgctgctaataatacttcattgatttggacacggtgagtgcttaaagtctcttgcaataacatacgggtctcattctcatttaacaccacagtaatttcctcagttactgcgcttactggattacttatagtaccatctaccggcaatttaactacgtcttgttcagcctgctcctcccagtaatgtagcacttcttttgataggccagtttcagcgtaatgatgtaatttctccgaccattctttaaaagatgtactcttcataggtaattgaattttctgcccttggactacttgcgtatatgctgtttgcaaatcttccaataaaattcgccaagaaacaccatccacggctaaatgatgaattgtccaaaataatcggccagcgtgctcaccttcatcaaaatacaccattctcattagcggaccatcatgtaaattcaaactttcttgtgcaatattaatctctttttgaataacctgatgccaattagcttccggcacttcgtctaatgaaatgacagtaagcatcaattgttcttctattccttcattccactgtttccaaaccccattaggtaaacgttcatatcttaaacgcagagcatcatgatgaagtagaaggttacctgccgccttttccagtgatcctatgtccaatttctctttcgttctaaagaacatggattgattccaatgatgtgggttaggatgattttgtgcaaaaaacctttgctgaataggtgtaagtatcgtctctccagttataattccctgttcagcttgtacaccttgttcttctttgactacttgcgccaactcagcaattgtttggtgttcaaatatttgttttggtgtcaattgtaaaccaacttgcttcgcgcgcgagacaatctgaatgctaagaattgaatctccaccaatttcaaagaagttatcattcataccaatacgttttgaacctagcacacgttcccaaatgatagaaagcttatgttcacgttcatttcttggggccacgtatccttcttgtgttccttgataatctggtataggtaacgatttccgatcaatctttccatttatggttagcggtaattctttcatttcgacaaagtaggaaggtatcatatggattggcagttttgttttaagatactctcgccattcttctaaactgccttcgcccactacataagctaccagcctcttatctcccgactgattttccctaaccattacaactgcctcttttactaagtcatgctcttgtaaagtcgactcaatctctccaagttcaattcgaaatcctctaatcttcacttgattatccattcttcctaagtagtctatattaccatcaggaagatatctcacaagatcacctgttctatataacctctcgccttctttgaatggatgagaaataaatcgttcggatgttaactctggacgattcaagtacccccttgctagacctgctcctccgatataaagttcccccattacaccaactggaactggcaacctatttctatctaatacataagtttggatgttaggcaatggacgtccaattgttactctcttactatctttcttgatatgatagcatgttgcatcaaccgtacattctgtaggaccatatacattataaaactggattttatcagtctctactagctgttcccataatgacggcataattgcttcaccaccaaccagtaccttacttggaacatgaacgccatcgcacgtttctaacaatccgacatctataagtaattgaagcaatgaaggtgttatatcaaagatttctaacttgttctccctaatataagctacaaactgctccggatcacttcgtacttcgcttggaataatatacaaacttgaaccataaagcagcatttgtaattgctgaatagatgcatcaaaggcaattgacgcatttaaaccgacatgcatgttagatggtatctcatcttcgaaaacctctttttgtaaaccatgcgacaagtttattacagaatgatgctgtatcaagacaccctttgggttccctgtcgatcccgaagtatagataacatacgctaggttttctcctgttacttcacattttggtgaaagaatgctttcttgcgaaatcattgtttgatccctatctagacaaactatcttgatttctttaggtatccaatctttcaatgactcgttcgtaactaatacttgaattccagtgtcctccaaaatatatcgtaggcgactttctggatatgatgggtctaatggaacataggctgctccagccttccaaatccccataatactaacaaccatctcaattgaacgctcaaagcaaagtccaaccaatgattcattcccaattccgcattgctgaagatagtgggccaattgattagctttttcattcagctctcgatacgttaactgctgtttttcatctaccactgctaccgcatcaggtgtacgatttacttgctcttcaaacagctgatgaattgtactttcctgtggatatgctacagcaccattattccactcttccaactgtttttgctgtaatcctgataatataggcaacttagctaatgatttatcaggattctccacgattacattcaaccagttcccaaaatgttcagccatggattcaatagttaagctgtcaaataaatcagttctataaacaaaagtaagtaataaaccctcttccacttctgcagcagttaaacttaaatcaaacttagcgatcggagcattactttccattacttctatatttcttccatgtaattctggtagcttctgtcccgtattttgcaaagtaaacatggtttgaaaaatcggagaatggcttgtatttcgttcaggttggataacctctacaattttctcaaacggaacatcttgatactcatacgccttcaatgcttttatccgtacttgagataacaactcttgaaatgccggtgcattacttaaatcagctcgataaaccaaagtgttgacaaagaaaccaatcagcccctcaatttctcgataatttcgatttgcaattgggctaccaacaataatatccgtttgtcccgtataacgagcaaggaaactttgatacgatgccaataaggtcatgaaaagtgtggccccttcttgacgacttagttcgtttaatttatccagtaatgagcgtgacaacaaaacattatgagttaatccatgatgggtttgcactggcggacgcggacgatccattggcaacattaagactggtaactcaccagataattcttccttccaatatgcaagctgttgatatagtacttcatctttcaaccagtctctttgccactgagcaaaatcggcatattgaactggtagtggttccagctctgcttgtttttcaccaatcgcattctcataaaatgccatccattcttgaagcaagatttccatcgaccacccatccgagataatatgatgcatattacacagaagaacccattcttcttctgaaattcttatgagtttcccacggaataatggcccttgttctaaatcaaatggagattcgacttcagtttgaatccattgctccagctttctttctcgctcctctaatgaaagcttagttaagtccatttgcagaagcggacggaaaacgtacggttgaatctgctgcacaggatggccatcctcttcataaaatacagtccgcaaagattcatgacgctctatcaactgattccatcccaattccaatgcttcaggtaaccaattccctgtaaggcggcatgccattggcatattataaagggcactattaggtgcaaattgatcaataaaccataagcgctgttgggcataagatagtggaatattatttccacgttccatcggcaccaatggtggaatttctcgtttttcattccccttacgtaactgatccattcgtttcgctaatgcctcgatcgttgaatattcgaacagttcacgtactggcaatttgatttgaaagacttcctgtaagcgcgagaccacttgtgtagcaagtagagagtgaccaccaagctcaaagaaagaatcctgaacaccaatgtctcctattcctagcacttgactccacactgaagcgataagttcttccagcggagttcttgggtatacagtattttcagcggattgttcactaagtataggcaatgccttcaaatcaagttttccattcggtgtaagtggtaaaaattccatctcaataaagtttgttggaaccatgtaatttggtaaatgtgtttgtagatgttctcgccattcatggacacttccttcaccaactacataagctactaatctcttatcaccttgattatcctctcgtaccaatacaactgcttctttcacagaagaatgtgcctgcaaaacagcttctatttctcccaattcaatccggaaaccacgaatttttacttggtcatctatacgtccatggaactggagattaccatcagaaagataacttgctttgtctcctgtataatagagacgttctcctgacttgaaaggatgtggaataaatttttcctttgtaagatccggacgattagcatatccacgtgcaagactcttccctccaatatagagatctccaattacgccaattggtactagctgaagatgagaatctaacacataaacttctgtatttgcaatcggtcgaccaatcgatggcgtacctgttgtcactcctacaggtacataacaatctgtggtaacaacggtattttccgatggaccatactgattaattaccgcaaaaggaatatcgttagatgggtactgcgttaattgatccccaccagtaatgataaaacgaagatccgttttatctggccaagataatttcaagagcctttccagaataggcgtaggtgcaaagctagctgttattcgtgaatcaatgagccagtcccttagtgcttctggattaattctcagttcctctgttgacaagtagagtgctgcgccagcagttagatacggccaaatctcctgcacagccgaatcaaaagcaacccctgcaatctgagtcgcacgatcctctgctgaaatatgataaacttcctgatgccaagaaaccatattcattaatgagcgatattcaaccatgacacccttcggttttcctgtagaaccagaggtataaacaatataggctaagttctctggatttatttgacgtgtaggtgcgattacgctttccaccgttaattcttctaacctcaccatttcgacgtgtgcgaaatggccttcttgtccttccgccgtcactacaaattgaatccctgcatcttcaatcatgtattctaaccttgattttggatacaacggatctaaaacgacataagctccaccagcttttaaaatgcctagtaaacttaccattagctcagctgacctcggaagataaacccctaccactgactctggggctactccctttcgctgtaaaacatttgccaactgatttgcttgtgtatccagttcaccataagtccactgttttgtttgatcaactatcgcaatcgcatcaggacgccttgctacttgctcctcaaatttgtcgcaaataagaccctgatgagacatttctattacagtgtcattccatgtttctaataacaaagtacgctcgggttctgatagcatgctcagatcatgcaacggattttgtgggcgatgagaaacttcatgtagccatttctcaaagtgtcctgccatccgttcaatagtagtagcattgaataaatccttattgtactcaaaagtaaaaagtaatccctcttccgtctcaactgccattacacttaaatcaaactttgcaattggactatggctttctatcatttcaatacttctactagataacaccggtaacccttgtttcatattttgcaagatgaacatagtctggaaaattggcgaatgacttgtacttcgctccggttgcacaacttctacaattttttcaaatggaatatcttgatattcatacgccttcaatgccttttgacgaacctgatacagtacatcttgaaatgtcggtctaccactcaaattagctcgataaaccagcgtgttaacgaagaaaccaattagtccttcaatttctctataattccgattcgcaattgggcttccgaccagaatatcttcttgtcccgtataacgagatagaaagctttgatatgcagctaaaagcgtcatgaagagcgtagccccttcttttcgactaagttcattcaatttatcatgtagcgtgcttggcagaaccatagtgtatgtcgacccgtgatgagtttgtattgcgggacgcgggcgatccacaggaagttggagtacaggaagctccccagacaattcttccctccaatattggagttgttgatcaagcacctcctcctttaaccatcctttttgccactgagcaaagtcggcatattgaaccggtaatggttcaagttccgctacctttccatccgttgctttctcataaaatgccatccattcttcaagtaggattcccattgaccatccatctgaaatgatatgatgtagagtacaaaggagtatccattcttcctctcccacgtgcaaaatacttgtcctgattaatggaccctctgttaaatcaaatggtacttctgtttcttgttgaattaaacgtttaacttcttcttcttgatcttcagaagaaagcatagttaaatccgttttcggaattgattgaaaagcatacggttcaatttgctgtacgggttgactattcacctcttgaaagaccgtccgcagtgattcatgacgttctattagttgattccatcccgtttccaatgcttcaagtagccaattccctgtaagacggcataccattggcatattgtaaagggcactattaggtgtaaattgatcaataaaccataaacgttgttgggcataagatagtggaatagcatctcctcgtttcattggtattagtggcggaatctctcgttttttatctcctttacgtaactgttctaatcgctttgccagtgactccaccgttgtatattcaaatagttcacgtactggtaattcgatttgaaaaattctctgtaaacgtgacactacttgagtagctagtagtgaatgaccaccgatttcaaaaaaggaatcctgaacactaatattttttattcctaacacttggctccaaacggaaacgatgagctcctccactggtgttcgtgatgaagtaatatcttcacttatgaactgttcttctaattccaataatgctttccgattcactttaccatttggagtgagtggcataccttcaatttggaaaaagtatgccggaaccatataatgtggtaattgcttcttgagatattcacgccattctccagcatccccttcacccactacataagctactaactgcttatctcctggtcgttcttcctttaccaacacgactgcctcttttacagatgcgtgatcatgtaaagctgcttcaatttctcccaattcaattcggaatcctctaattttaacttggttatctattcttccaatatattctaagttacgatcattcatatatctcaccaagtcacccgttcgatataatcgttccccgtccttaaaaggatgcggaataaaacgttcagcagttaaatccggtcgattgaagtagccacgtgccaatcctactcctccaaggtaaagttcccctgccacaccaatcgggaccacttgttgatattgatctaacacatacaactctgtattatcaatcggacgaccaatcggaataagcattgcttctttttctaaatcacaatcgtaataagtcacatccacagtcgcttcagtaggaccatacaagttaattaactttgtttgctgaacattgtaaaagatccccttaaaccggcgaacctgctcagtgtttaacgcttctccactagtaaaaacttgaattaaagacgatacatcccttttcgaattatatagttccatataatctaagaaagtagataacatcgacggaacaaagtgcatggtggacacgcgatatcgttcaatatactcctcaatcaccgcaggatctttctctcctcctggtggaagtaaacaaacacgtgctcctacaaatgaccaccaaaataattcccatacagaaacatcaaatgaaaacggtgtcttttgtaggattgtatcctcctcggacaatgggtattttctctgcatccactgtaggcggttgataacggaatgatgttcaatcattaccccctttggatttcccgtcgaacccgaagtgtatataatataggctaagttatttgctgttactccacttaccggagctaaattactctctttagaaatcatcacttgatcccggtctaaacaaattgcttgaatatctttaggtaaccagtcctgtagtgcctcttttgttaacagcgcttgaatttgtgaattctccaaaatatatctcaggcggttttcaggataacttgggtccagtgggacataagccccacctgccttcaaaatcccaaagagaccgataatcatatcaggagaacgttcaatacatataccaaccaatgattcaggtccgatacctcgtttttgtagaaaatgtgccaattgattcgatttttcatttagttcttgatacgttagctttccaccctcataaactaccgccactgcatcaggcgtccgtgcaacttgctgctcaaatagctcatgaatcatacaatcatgaccataaactacgtccgtatcattccattcttctaggagttgattttgctcagtatccgatagcattgacagctttgtatatgattcatctggatgatacgtgatttcatttagccagttctcaaaatgtcctgccatacgtgcaatggtactactatcaaataaatccgtgttgtattcaaatgagacgaatagaccttcttccacttcataggcagttaagctcaaatcaaatttagcaatagacatattactttctaccatttcaatacttctatcaggcaaatctagtcgttcttgttttatattctgtagcgtaaacatggtctgaaatataggggaatgactcatgcttcgttcaggttgcacagcttctaccactttttcaaatggtatatcttgatattcgtaagcttttaacgcctttttctttgtttggttcaaaatctcccgaaaagtaggggtgccactcaaatctgatcgataaaccaacgtattaacaaagaaaccaattaatccttctactcccttatggttccgatttgcaatcgggctaccaactagaatatctttttgtcccgtataacgagcaagaaagctctggtatgcggccattaaagtcataaataaagtagatccttcttgtcgacttatatccttcaattgactgagcaatttataaggaaaaatcacatgatgcgcagccccagagtaagtctgcttaaccggtcgaggtcgatccactggcagttgtaagataggaagctcaccagacaattcttcctgccaatacgtaagctgacgatttagcacatcaccttgcaaccaccccttttgccacttcgcaaagtctgcatattgaatagataatgaacttaatttagcaggatttccgcccgtttcttcttcatagaaagcaaggaattcattcatgaatataccaatggaccaagcatcagaaataatatgatgcatcgtacacagtaataaccattcatccttctctaattgaacaagctgattacgaattaaaggaccattcattaaatcaaatggttcttgcgcttctctcgcaattaaactatctacctctttttcttttacttctagaggaagttgagagtaatcccttacaggtaatgctctaggaaggaattcgacaatttgttgcacaggctgttctcctatttctttaaaaacagttcgtaatgattcatgacgttcaatgagtcgattgaatcccttctctaatgcttcaggtatccaatttccttttagatgccatacggttggaatattatataaagaactgtttgggttaaatctgtccataaaccacaaacgttgttgtgcataagacaacgggagtgcttctttattctcctttttttgcatttgcttctgaagccatgctctcttctcaggagaaagtgaactcagctttgcaagtaaatcacttctcatttttttaccccttcctcaatcaaattactctcaaatatcccttgtgcttcttcctctgataactcttctaattgcttaagcagttccagtaattcttcatcattactcacttctgcttctttttgaatataatcttgaaggcttatattctccttactatcattctgcatttcttgatttttgttatcgagcaattgatcaatctgttctgccaattgctgcaccgtatgaaacataaataaatcatgcaatgatatctcgattccaaaagcctctttaagattggaaacagcttgcgtagcaagtaatgaatgtccaccaatttcaaaaaacgaatcttgaattccgatgttttccatgcctaaaacttcatgccatatcgaaacaattgttttttccgtagacgtacgaggagcaatataacaactcgctatctcctgcttctctggtgctggtaaagccttcctatcaatttttccattaggagtgagtggaaatgcatttaatccaacaaaataggatggaatcatataatttggtagttggtccttgagataatcacgccacttttgagcacccccgtctcctacaacataggcaatcaaacgtggatcgccaggataatcttcccgcaccatcacaatagcttcgttaactaatgtatgcttttgtaataccgcttcgatttctcctagttcaatccggaacccacgaattttcacctgatgatcaattcgtccaacatactccaaatttccatccggcaaataccttactagatctccagtccggtatactcgctcgtcttctttaaacggatgcggtataaatcgatttttcgttaagtcagggcgttttaaatatccacgtgctaaccctgatccaccaatgtacaactcaccaactacaccaattggaaccattttttgttcagcactcaatacatatacttctgtattgaagattggtttaccaattggtggtaccctatgcatgacacccttttctaattccatatacgtggaatacgtagtatcttcagacggtccatataagttgaacaccttctcaatcgtacttctctcgtataaatcttgaacaagcggatatggtaacggttctccagccaaattcattacctttactgaagaaggaattgtttttgctcgaaccagttcctttgctgccgatggcacagtattaaccaaagtcacacctttggtagacaacttgtctagatgtagagcattttcagcgacaatcaccttaccacccatcgttaagggaacaaatacttcaaaaacagataaatcaaaagatagtgaagttgaagctaatactcccgctaattcctttcgagaatacgtatgatgcgcccaatgaatcattgttactgtattcctgtgctcaatcattactccctttggatttcccgtggaacctgaagtatagataatataggctaagttatcacccgtcacttcactcgtgcataccgtagtaacttcttgttctatttctgctcgattacgatcaatacaaatgacgttaacgaatgtaggtataaccattttttgttgtaacttttcctgtgtcaccagtacctttatttgagcatcttctaaaatgtactgcagtcgactttccggatacgctggatcaattgggacatatgctcctcccgccttcataattcctaagagaccgacaatcatctcggatgaacgtgtaacgcaaatcccaaccaatgtttcgcatgttacaccatttttttgtaaataatgtgccaactgattcgagcgttcgtccaactctcgatatgttagttcttcatcttcgcacactactgcaattgcttctggtgtttttttcacttgttcttcaaacattgtatgaatcgtactatcttctatatctataacggctgattcattccattcctctagtagttgcttatattccactttcgataacatattcaattctgataataaacattttggataagaggcaatttgatttaaccaatgttcaaaatgatttaccatacgtttaatggttgtatcattaaacaaatcagtattatattcaaaggttagtgataatccttcttccgtctcagaagcaaataaactcaaatcaaatttggcaacagaaacatagctttccatgagttccatttgtctttcggatagctgaagaaactcttgtttcgtattctgtaaagtaaacatagtttggaatattggtgaatgacttgtattccgttcaggttttacggattctaccactttctcaaatgggatgtcctgatactcgtatgcttttagtgctttttttcttatctgcgacaatagttcttggaacgtcggatttccactgaaatcagctcgataaactaacgtatttgcaaagaatcctattaatccctcaatctctttcacatttcgattagcgatggggcttccaactataatgtcgtcctgtcctgtataacgagaaaggaagctttgatacgctgccatcaatgtcataaataaagtgcatccttcttgcaaacttaaatctttgagcttttcctgtaaggaattcgccactattaaggactgacttgcaccacgatgggtttgaactgcaggtcgaggacgatccatcggtaattgtaaaaccggtagttccccagataattcttccttccaatattgaagatgctgattcaaactctcctctttttgccattccttctgccacatgacaaaatctgcatattggatagataactccttcaattccactggttttccggttagtgctccttcataaaaagccatccattcttcaagtaagattcccattgaccatccatctgaaataatatgatgcatcgtacaaatgagaacccattcttccctgtccactttcaatattcgtgttcgaatcagaggaccttgtccaaaatgaaatggttcctccgcctcgttttgaataaggcgtttcatttctctttccctatcttccaaagaaagatctgttagattcgtttgaggaatatgcctgaacacatgagattgaacctgttgaaaaggttcaccctcttgttctagaattgtcgtccttaatgattcatgacgctccaacaattgattccatccgacctccaatgcttcaattgaccatttacctgttaagcgacacgctgcatgaatattgtacatagcactatttggcattaattgatcaataaaccatagacgtttctgcgcataggaaagtgggataacttcttctcgtttcataggtacaagaggagcaacctctcgttttttatcttcttttcgtaactgatccactcgtttcgccaatgcttccactgtatcgtgcttgaaaagttcacgtaatggaattttaatttggaacatttcttgcaatctagagacaatttgagtagcaagtagtgagtgcccaccacgttcaaagaaggaatcctgaatgccaatattttctgttcctaacacttgactccaaaccgaggcaataagctcttccgatggcgtccgaggtagcacatttaaatcttcaatagcttgctcatcaggtgctggcaaggcctttcggtcaattttcccatttggagtaagcgggaagtgttctaaatctataaagtgcgctggaatcatatgatttggtaattgtttttgtaaatactctctccactcctcggtatttccatcgcttattacatatgcaaccaatcgttgatcacctggacgatcttctctaactaatacgacagcctctttaataaacgaacatttttctaaagtcgcttcaatttctcctaattcaatcctaaaaccacgcattttgacttggtggtccattctacctataaattctaaattcccatcagttaaatatcttactgaatctcctgttcgatatagtcgttccccaaatcgatatggatgcgaaacgaatttttcagcagtaagattcggacgatttaagtatccacgtgctaaaccagcaccaccaatatataactcaccctcaattcctattgattgcaagcgttgattttggtctaatacatataattgcgtgttctgtattggctgcccaatagaaacaaattcttgattaggctgaatatcaaatgcattcacataaatagtggcttcagttggcccataaaagttggttaatttcacttgtccactataattccatttctgttgaaatcgtctaaccaaccctgaacttagttcttctccaccagaaaatacatggcgtacggacgaacaattcatattcaattcaatatgattgaagtggtctaagaaaacagataacatcgaaggtacaaattgaactatagtaacctgatgttgtttaatcacttcagctataatagaaggatctttttctccacctggaggtaggaaagatacacttgcaccaacgtgaatgccccaaaacaattcccaaacagagacatcaaatgagaatggcgttttctgcaagaccacatccttttcagaaagcggatatttatgttgcatccattctagataattaattactgaatgatgctcaatcattactccctttggattccctgtagatcctgaagtatacataacatacgctaaattttctcctgttacaccacttatacatggggttgattcttctttttcaattgcagtgtaatctttattcatacaaatcgtttctatattttcagatacaaacaaatttttagaattctcttccgtcactagtacttcgattccagcatcctctaatatatatcgaagtcgactctctggataagtagggtcaagtggaacatacgctgctcctgattttagaatacctaataacgctatcatcatttgtaatgaacgttccatatataccccaactagaaactctgggcctacaccatgcttttgtagataatgagctagctgatttgcacgcttctccaactctttataggtaatttgttcattttcgtaactagccgcgattgcttccggtgtttttttaacttgctcctcaaacatcgtatgaatcatgccttcagccgaataattaaattgagtatgattccattcctctagtaactgtatctgttcttcttctgttaaatgagtaatttcaaatagttttgaatctaggctcttcgtcatctgaattaatatttgcaataagtgattctgaatcagatttattgtttcttcattaaaatagcttcgatcatacatcaactttaaagtaattttcttaccgggcattacaatgagtgttaaaggataatttgtttgttccgtgcttgtaacatctagtaatcttaaatcatcatttctctcaccttgaattggataattttcaaacacatacaaggtatggaataaggagctatttcgcggaacctcactccagccttgaatatctatcaacgaattatactcatactgtcttcgttccatttctttcatttgtattttacgaagccaatctactactgatgtattatccgttaatcgaattctggtaggtaatgtgttaataaatagccccaccatattctctgctcccattaaatcagtaggacgtccagcgctagttacgccaaatacgacgtcactgtcaccgctatacctactcatcaaataagcccatgcaccttgtactaacgtattcaacgttaatcgactatttcgtacccactcttgtaacttctcagtaagtttctcagatacttgataaacacactctccatagcccttctcttgtccttgatcctttctttccattgctaatggcgtaggtgcatagaacccttttaattcttctttccaaaattcctctgcttgactttgatcttgtttatttatccactggatatattttttataaggaagagatttaggaagagtcaataattctccctttatcatcttgagataaacttccatcacttcactaaagaccaatgacacactccatccatctagcaaaatatgatgatgtgtccaaataattctcgtttcctcttttgcttctttgatcgcagtgactctcatcaatggtgcttcatccaataaaaatccttttctacgatctacattcaaaaactgttgtaatttcttcaccctttcctcatgtggataggtgctccaatcctcttgatgaatagtaaaaggaagacgttggtaaaccgcttgtagtggcttttctacttcctcccatacaaatactgaacgtaaaacctcatgtcgattaataacatattcccaagccttttcaaaagtatcaacatccaattgccccccgagcaagaaacctacttgtacaatataggaaaaagaatgttcatcatcttgatcgtataaagtatgaaacagtattcctttttgcaaaggtgataaaccatatatatcaataacgtctcccatttttacaccctcttctttgttaatttaagtaatactttgctcaagctttcttccgtaagatcctctgcatcagcaaaatctgataccgtaaaagcagactctgttgttggtttatttataagttgacgaagatgcctcaacataccatctgctatcacttgaatttttaatttagaaaactgtttcctactatacatccaaataaaatgtaacttttcatctttcaccattccgataacatcaattagatgagatggtttggaatctggagcatgatctaaaaatgtaaatcctgtctcttgcataaacaaagagtcccttgaaaacacctgatcaaattggcccaaatagttaaagcttattgaaggcttttgctgataaaacggaagtaatcctttattcaagtaacgtaaaatgccatagtcaactccgcgatttgggattcgacgcaattgctctttgactgcctttaacccttcaataggtgtctgagttccttgaaaattgagatgaacgggataaatactcgtgaaccagcccactgtccttgataaatcaataccttcaatcatctcttctctcccgtgtccttctagatgaatagaaacggtttgctgatttgtacaatcgacgatagcttgtcctaatgccgttaatagtacctcatcaatccttgtcttatgagtgactagaacttcgtgaaacaatgcttgtgtttcttctattcctaaagtcctcgtcacttgatcaatcgattcttctgtcgtttcttgtattggatagtccattggaattttcatcgtttctttttctacttgttcattccaataatcctttacttcttttgaaatacccgaatcactgtatgtctgaagtcgttcagaccattctttaaaagatgtacttttcgcaggtaagcgaatttcttgaccttgtttcatctggttatataccacctgtaaatcttccaatagaatcctccatgacactccatctactactaaatgatgtatcacccagaatattcgatcattttcagtcaagttatcttcaaagtacactactttcattaacggaccagtaattaaattgaaactagcttgatgaatattcatctcttcttgtattattttattccactctttttcattaacttgattccgttttacaacatggagtactgacagctcatcagtcccttcatttctctgtctccacgttccgtttggtaactgttcgtaccggaaacgtaaagcatcatgatgtttcagtaaatttaatatcgctccctctagtaatttcacatccaatctttcttttactcttaaaagcattgattgattccaatgctctgtatgtggatgttcttgctcgaagaaccagcactgaattggagtaagaggcacatcacctatcacaattccctgctccgcttgtactccctgcgtttctatagccacttgtgccagctcagcgatagttgggcattcaaacatttgctttggagtcagttttaaccccacttgacttgcttgagatatgatttgaatactgagaatcgagtcgccaccaatttcaaagaaattatcatagattcccacctttttaacacctaatactctcttccaaatggtagttagtatttgttcgttactattccgagggccaacacattcactattaatctgcttttcctccggcataggtaaggcctcacgatcaactttaccgttagttgtaagtggaatagcttccatcgccacaaatcccgaaggaaccatataacttggtagtttcgctttaagatattctctccacgcatctacatttccatctcctacaacatatgctactaatcgtttatcgcctggctgatcttctcttacaattacaactgcctcttttacatatgcatatgtatgtaaagtagactcaatttccccaatctcaattcggaaaccacgtattttaacctgatgatcaattcttccatgataatctagattcccatctggcaaatacctcgctaagtctcctgtccggtataatcttgctttcagatcactactaaatggatgagatataaaacgctctgctgttaattcaggtctatttaaatacccacgtgcaagccctgccccgccaatataaagttcaccatcaacacctataggaacaggttgttgataagcgtctagtatatacacttctaaatcgggaatccgctttccaatattacttcttgaaacatgctgcacatcatctaaagtaattggataatatgtaacatgaactgtagtttctgtaattccatacatattaattaactgtggttttttctccccatacctttgaaaccacggtaacaagctagtaggttctaacgcttctccgccaaatatgacataacgcagctgcaaatttttattcttatcttcttgttcacacacttgtattaattgtcgaaatgcggaaggtgtctgatttagaactgtgacttcttcctccaccaataattgataaaaatccttaggtgatcgactaatccagtacggaacaacaactaattttccaccatataataacgctccccaaatttcccatactgagaaatcaaatgcatacgaatgaaaaagcgtccaagtatctttttcattaaactgataccaacaatccgtcgatttaaataaccgaatgacattgtgatgttctatcataacgccctttggatttcccgttgatcccgaagtatagattacatatgccagatttttgggaccgacactagaaaccggcaaagtcttactttctttcccaatctcatcttgatcacgatccaggcaaatcgactcaacattttctggtaaccagttcaattcttttaaactttcttgcgttacgaataactgaatgctagcatcttctaaaatatattgaagtcgttgctctggatatgttggatcaagtgggacataagccccaccagccttcaaaatccctaaaatacctacaatcatctcgtgggaacgttcaacgcacagtccaactaaagtatcaggtcctactccttttttctgcagataatgagctaactggtttgcacgtccattaagctccttataagtaattttttctttttcatacgtaactgcaatagcatttggataaatcatcgcttgccgttcgaacatttcatgaatagttacttgaggcgggacatccagtttaggattgttgaactcaactaaactttttcttttatcttcctcagaaatgatttctatttcagccaccttctgctttgggttttcaaaagtgttttccattatcgctaacatcacgttaaaaaaccgttttatctcttccttagaaaatagctcctcacgataatcaatatgtacatgtaaagagtctatatcaattagattttcaatatgcactgcaaaatcttgtacttcttcacggtttggaatccatagtgagtcaccactttcatcacgatccctataatcaatcgtagttccgaaaagtctcacattactgttattctctttattaatctgctttaataacaaatcaaatggatatttctggtgtcttaatgatttactttgttttctggacaccctactaataaatgaaagtacttcttcttctggatcaatatccattcttaaaggaactgtactcaccatcattccaatcaattttcgttccattttagtcatacggttgccgtaagccattcctaaaccaatatcaaacgatgaggtccaccgatacatggacaacgagaaagcagcaacaaaaagggtgtataaaccaaaattgtaatcttcagaaaatttttctatctttctcttcaaatgctccgttaatataaacgtctcacgtgatgctttggtactaacttggtacgtattataaggcttcaacccggtcatagatggcagtgttttaaattcctctaaccaaaatttttgatctttttgaaaacgactactattcaagtatgtttgttcattggtcagaaattgaacatatgaatttttaatttcgccttcctcattctcgttatgcatgtcataataatattttgcaatctgctcagtaaatatttgaattgataaaccatccataataatatgatgaacatttccaaagactgcacattcattatcgtttaattttattaaagcgaaatagtataaattggaattaaataatgtaaacgtttcttttgttttctgctcaatccattcctcaagcaaatttgtattctccacattactgaaatcaaaaaactcaaattcttgttcttcatgtttaataaaatattgtttcggttcctgatgcccattttcttttaacctaatgcacagaccgtcattttcactgataacgcgattcacaacttggtttaattttgaatagttcattttccgatgaagtttaaataaaaatcttaaattacatattcctttatcagaatgaataacttctgtataccatattcttcgctgcggatggcttaatggataacattcctcattggtcataaaaatcttcccttcaaaaattatttgctcttattggttcgtgtttatgtttagcccataaatatttctgcagtgaaactccaattactccaataataacaagcccaatccctccataaacatagagttgagttactccaaataaatgcactaatgggccactcatagcaggggaaataattaaaactgcgtttgttaaactgctttgtataccaaatactcttcctacttgatcttgatcggattctatttgtaatatgacttgattagatacaagcatcagcccacttccaataccagcgataaaactaattaaataggctaaaacgaagaccgtaccgggcgttatcaaaccaatccccccaaaaccaattcccattaaaaccatacctccacatactacccagccatattgaaattgttttaatttctgagttagtaatgcaccaagtattccgccaagaccaataatagaaatgatatatcccattttacttttatcatgtgggaataaactcttaaataaagttgggaattgtgagtctactaattgtaatactgccatggctattgtaacgaaaatcatggttgataatattatccgattagataacacataaccccacccttgtacccaagcggtccaagtactttgtttttgcttttcaacaaattctttcgatatagtttctttaaattttattgtgggtatgagaactaaggtagctaataaacaacttatagctcttataatgaggcagaactctggttgaaaccaactcagcaacatgccccctataagtgggcctactatctttgtaccctgctctactattccgttgatacttactgctttagtaagcaagtccggggatacaatctgtcttgttagtgtttgctgtgcaggataatagaaaacaataaaaatggaacgaatcattaacgccactaagagccagtggatatcttgtacaaataaaagagcaattgttattagaccaaccattagattacagaacatcataattggaatttttctaaaacgatctgcaataacacctgcccatgagccaaaaataattccaggaagtgcatatgcaacaggaatcaatccaatcatagtaggatctacttcccattcaaacccaactatagtcataatcgctaacatatcaataaaaacaccaagcataagcaatgaataggcagagaaaacttgtaaataaaccctatttcctaataggccttttgaatcaatagttttcataaaagcaagctccttaggttactaatataaacgcttttgcgtataaggtacctctttattaaacttaattaatcattattgacatctcacctagaatttaacttcgtcaaaactcaaactactcttgtttttcatatatttaaaatagtcagacaaacgaaagcgtacctatttcttcatttttatatcaactgttacaaaatatatctttaccttacactaataacagctaaacgtttccttaatataaccctttacagtcgtttgcacattcaattcacatcctttttaaagttggcttttttctatctcaaatactatcacacaaatatttcacctactatattcataaagttgaaatatttgaatcagaaaattcggataaaaaactaaatccacaaatcataccaaacaattatttagttatattgtcattttatagatagctttagccataaggatatcaagaattaagttttttaattttattaacataatagtttatagagactataaatcctactaaacaaaaaaataaatatacaataaagtatatttattttttcttatcctacatattttctatgcaaattaattccaataactaaagttgataataaaaatataatattaccaatcactaatgtactcataacaagaattgaataatatagtattaatacttctgcacctactacctattttatttattggatatttatacttcaaaaaaaattacacatcattcacaattaggatacatacccaaaatatcatttgaacatgttattatattttaagataatataaaatcagtttttctataagagaacttaatttttatgtagtacgaaattgttagtaatacagcatatactaatttagttataaaaacatttaaagaccacctatttccataagtgatctttctttgtgattctgtatttgtgcactactgtagaaatatatcgtagaaacgctttgtttgctaaatgtttagttctttccatttactaaaaaacatagcttcatacacttaatatcatattcgttacattgcaaactattattttgtcttctgtacaggcaaactactaaaaatcaattcagcaacttttacatatccttttgagtttggatgaattaaatccttagaccaaagcgtattgtcattaactaaatgatgattccaaaaatcaacatgatgaagcttatactctctgctcagtgaatgtataacttcatttgcctctaataattgttcttttatttcttgttttttttcagaagcaaaaggaagcctaactgtaaaatcaggaaggtttgctataataatatcagcccctgctttacttaatgtatctatcataaattccatatcgttcttatatgcatcatgattccaacgtccttttaaaacatcgtttgcccctgcaatgagactaaccaaatctggattaaaagttaacgccttttccaattgctgcaagcgaatttcttcagttactaacccacgctttgcaaaattggcatattctatatctttttcacacagttgaacaaaatgatctacccagctttttaatgcaattccctcaacttcatcccctatcccctctgtaaaactatcaccaattgctacaaatcgcttccacatatgtattccccctttatttttaaacatatctatactatacaatagctcacaccgtaattgttatttctaagtggttttcgatttcaattatattccactttactatatttacatttagaatccaaaattgaccgattcccaagtatactaaggaatcggtcatattcgtatatttactaaagaaataaaatccctctaggacttatacttttttcaaaaaatttgttgttctttgttttgcccagttgatacatttcttttcgattacatgatacgaaactatagaaaaaagtagtgtcattgcaatgcacaaagtaagaagaaaaaattacaccctgacattccaagctatccacataagaatctatagtgctttgaaaccttttgtttcaaactaatatttagttgtatcctataaaattagctttttactatatcaatcgtacgatcccacataccactaaaaaaagatcctgttttacgtataaaacgtgtaagccaatttgcttgttccacatcagattttgttacaaggtctatttgtaatgaattacctgataagaacccaggatctgtattatctttagacgagataatcattttactaattgttacaccttttttaataggcgcttcttgttccgtattcgatactttaaattcttttttataaatgtctttattgcccttcggcattggaagtgaaacagcttgcttcgtttgaactactacatctttgtcttttgcatttgccactcgaactgtttcatgtccttttattactgaatcttttccgtagacattcttcacttcaaaattcgcaaatccataatcgtataatttctttgtttcatcaaaacgtgccgtatgagattttgcttttatcactacagaaattaggcgcataccatttctttctactgtaccagtgaaacaatctcccgcttctggagtcgttcctgttttcaaaccatctacaccttcatattgcttaattaaaccttttaacatccagttaaagttcgccatatcaattggatatttaccaccctcttggaatgtttttttaggaatttttgctgtatttaatatttgggggaaatcttgaataagacgttgtgctaaaattgcacaatcccttgcagacattttatttttctcgtctagagttgtcccttctagatgatatccttttaaatcttgatttgttaagccggtagagtttacaaatttatagtctttcataccaaactctttcgacttatcgttcatcatttttacaaaattgacttctttaccagcaatctgttcaactaaagcaattgttgcaccatttgcagagtaaattgccattgcctcatataactcttttaccgtataagagccaccattttctaatggaacatttgatagtgaacgatcttgcgaaatcttatgtgcatattcagagattttaactttttgatcccatttaagttttcctttatccaccgcttcatgaactaagtattcgctcatcatttttgtcatactagcaattgccaatgattcatctgcatttttttcatataaaatttttccggaatttgcttctattaaaattgctgatcctgcttcaacgtctatagcaggaactgtttccgctgctgcttttccaattgtaacgaccatgctacaaaatagtgtaagcactgttactattgcaataactctcttgcaaaacatacctttcacttctgttacctccaatttctttgtactcaaaaaaagcgttattctaacataatcccgcaaaaaatagacagtgttctcaaattatatatacatataaaacgttagaatcgctttcatatagaccacctcatccgacacttttaggtgcgctaatactttgtattcccacacatatccttatttttaatccccttatatttttcaaaatgattcacactttcatattttttaggattacagttaatagacaatctaaataatacatttgttccacatttacaaaaaataaaaaactacaccctatactggatgtagtttttctaactgatttatttatttttcacttcatttttataaaaagcaaataatggttcgatggatggactagataacagcggaattgccttctcaatcaatttcctatcccaatcaaaccaacgcatttccattaacatgtttatttctgtatcagtgaatcgtttctttatttccttagcaggatttccaccaactattgtatacggcggaacatctttacttacgactgatcctgcagcaacaattgcaccttcaccaatagtaacgccaggcattattatagcattcattccaatccaagcatcacttttaatgactgtatctcccttaggttcatatgattgtttaatttgctcagcgaatggatatactgtaatccattctgagtgatgattatgattaccacccattaaaatgactaccccgcttgcaatgcaaacataattcccaataatgagtttgtcaaggtgccatcccatctgttcaattggattgaacagtgcttgggacttagcatctccccacaaataccttacacagccatcttcaaaattttgatgactataatagcctgaataataggagtactctcctacttcaatgagtggatttgttactatatcttttatatactttgtttctgaccaatgattaaataatggatgcttcataactttattcctcgcttctaagtattatatatattgctatttacttagaagcttactacgactgctacattttttagctttctcaaacgacgaatcattatcttcaagcctttcttttatactataaaaaagcataacgcaatacattacaatagtcaaactgtgtaattttgaacacatcttaaacagcgtaatactgcaataaaaacatgaaaacactctaacttcgatacaaataatatattgattacatttagtttatattttgtaaaaaaattttaattgccataacaaagcaaacaataaccactattggtcgtattaatgacgtcccttttgtaagcaccatcttcgctccaatatatgatcctataatttgaccaagcatcataatcaacccaattgtccaatcgatttggccaaaaataataaaatataacaaagcagcgaaattacttgtaaagttcaaaatcttagcatttgcagtcgcccgtgtagcactatatccacataagagaatgaacgctaaagcaatcaagctacctgttcctgggccgaagaaaccatcataaaatcccagtaacggagccactgttaacgcaaacaacaacatacttattttcctcggtcgatcttcgtttgctatatttggagataatagaaaataaatgccaataaaaacaagtaaaaaaggtaatatcataattagatattctgcccgtatctgtaaaacaagccatccaccgaaaactgatccaaaaaaggtcattaagatggacaaacgcatttctttaagattaatttctttcttcttaataaaaaacactgttgccatgagagttccgctactcccttgcagtttattagttgctatcgctacagaaggagacatacctactaataacattatcgggatagttatcataccaccgcctccagcaatcgtatctatccatcctgctaatacagctactaaaaatagtagtatgagtaattcaatagtaaaatccatacaaagaatatgggaaggcttgagctattataccccaaacctccccatcttccctcctctctttaaactagttaattaaatctttaaagtaactttctttctgatcacgtaatcggctggaaacgtattgcctgcaaacaattcttcttccgtatttattatttccaatcgggattttatattcttcctcagataacctttctctaccatgagttacatttgtttgtttaccatagtatgaatttgggataattaataaatcttcagatgtaagtggaaccttataagtaggcgttgttcgtaagagttctaaaaacatgtcaaatttcaatttttcttcttcactttctcctacataaatcaatctattctctgctccatttaaacaagttgcaataatatcaccattatcatctaaaaatataatttggtttatttcccctacaaatcccgatatttcaccatcagccattcctgcgatatgagcaataggcattttacttatcgccaatatgtcatctttactgaagaaattttcttcaagatgcttttgaagtaattttggcgttccaatatgagtttgagtttttaaatttaacactccttttaataaaagagcatcaactctagtaaattttccacaagtaatttcagacactattcgttccacggatttattaagtctatttgatacaatttctaaattcgtattgaatgttttcaatcttgcttcaatatctgattggtctttcatatctgtatacactgtggcatcgttatgttgataaaagttcccgccaccggtgcttgcaccgacatttcgcaaaacttcatcgttatttaaaggcgaaataagatgaaatctatttttcccagcatgttcggatgggtgaattaaagcatcataattaaaaagtgtggcaaaaagccatgtgacccattctgcataaaaatattttttcattctatcgtgttcgtcttcaccataattaaaacctctgcgattttccccaggtaatagtgtttctataggatcacatggagtatttttaataaggataggcggtacgttcccgccacaattcgctatttttatcatatgtagtaggtttttcatatctgaattcggatttttctttgaatagtcaatcaaacaattaagccactcttttgaaaaatatgctgctatttcttgatcacaagtataaggattatgagtttttaattcattttctatcagattcttcattttatccttcaatagattcggaatagtaatttcttcaatttctgtaatctgcagtattcctttattcattataaaacctccgttgttttattttttacaccctatcttcattaaacaaactatccacttcttttttactcctttacttttcgtcagagctattagaattaccgatttacaaataaaaaacatggagtataagagatttgttcttagctacatttcccccacgaacctctattgaattgacaaatttaatttgaaaatctgattcattttcatactttactttcaaactatgtttatatgattttcaattcaagtaagagtatttcattttctaaagttttcctaattttaaaatcagaattttcaatacaactatgttaacattaaaaatataacacgaaaccaaaaaatgtaaatgaatagttttttctaaaaaatagtcagactattcacaaggtaattcgtattccattgaaccaactacggcccctcaattttattgataacaataaaaaagccccctaaattgaagtgacccccgaaagttagacaggtcgtttcattaggcagcctctagggtatttttacaggtctctcatgaaagtaaaaaaattaagtttaaacatactatacgaggagtggatgttatgaaaaactatacaaagcaattcgtcctatcttcttcttttctttttcattttcttaaaaaggaacaaaggcattcgcctttgttccttttttattgcgatctatatagggggaattgttatgaggccatataaacgtgtcttaattaaattaagcggcggtgcacttgccgatcaaactggaaatagctttaactccaaacgattagaacatatcgcaaacgaaattttatccattgttgatttaggtatcgaagtatccatcgtcatcggtggcggtaatatttttagggggcatctagctgaagagtggggaattgatcgcgtagaagctgataatatcggtacactaggtacgatcattaacagcttaatgcttcgcggtgttttaacaagtaaaacaaatagagaagtacgcgttatgacgtccattccatttaatgcagtagctgaaccatacattcgcttacgtgcagtccaccatttagataacggctatatcgttatctttggaggcggaaacgggcaaccgttcgtgacaacagattatccaagtgtacaaagagctattgaaatgaatagcgatgccatattagtcgcaaaacagggtgtcgatggcgtttttacaagtgatccgaagcataacaaatcagcaaaaatgtacagcaaactaaactataatgatgtcgttagacaaaatatacaagtcatggatcaagcggcattactgcttgcccgggactacaatttaccaacgcatgtctttaactttgatgagcctggagtcatgaaaaaaatatgtttaggtgaacatgtggggacgttgattaatgatgatgttacgatgcttgtgcatgaaaagtaatgatttcccaccaaaaaagggtgccttttgtaggcaccctttcctaattcatcatcacaaatagaactcaaccaatcccgccactttctccttacaacgctcccaaaaagataacttttcaaaaaactctttcgtcatttctttcgaatcatgaaaatcctctgttaacgccttattaacttgtcctacaataggaccaccataaatataaaaattcatttcatcatttatattgaagctacgcgaagtaaagtttgttgtaccaataacggttaattcattatcaataagcattaatttgccatggaacattccttttttatacccatatacagtaatcccattattaacagcttgacgtatgtatggatacgccgcttcttttataagaggtagatctggtttatatgaccaaagtatttttactgtaacaccacgcttttgtgctgcgattaaagcattcatggactctttattttttgctataaaatacggcgttgcaattacaatggagtgctgagcttgttttatgagctctatatatttttcagcaacgtaatgcccattgtaactagtcatagtatgtaatgtattccctttactagctttattcgtactcctctttatctcttctttcgtatctcgtttccaatctaaagcgaattgctgttctaaatcttttgctccttctcctttaagccgtacatgataatcacgccaatatccaaatcgcttatctttccctaagtactcatctcctatattaaatccgcctgtatagccaatctccccatcaatcgtcgtaatacggcgatgattacgatggtgaaatgaataaaatccgaatggcaatgcaggttttctactatatgtaaaatgcacaccactttcccgtaattcatttatcatctttctttcaaatgataaatcattaatgcgatcaactgataaatagacgtttactccttcttttgccttctcttttaataagtttaaaaaagtatgactacttttatcatccgacaaaatgaagaaataagtgtagatggagcttttcgcttttttaatatcttcaaatagctgctcatataatgatttcccttctacatataattgaaaatcactataatgaggcgcatactctgtcggcatgttttttccagcttccattttcctacctaaggtaacatcgatatgcatacaaattaaaataaaaacgaaaatagcaataataatagaagtaactcttaatattttttttatcattttggtttccttccaatcatattccttactatttcgtagtgtttcatttaaatatgttttcatacgaaatgtatttcttatttttattgatactgaacagttaaaggagatacgaatatgagaaaaggaaaaactcctattgtttttatcccaggtcttttcggttcaatgagcaatattattattcccggcactggtaattggagttttggactttctgcatttgtttacgaaccattcatcatgatgctagaaagtatggggtacgaacgaaataaagacttgttcatctgtttttatgactggcggcagcgtattgttctttctacacaaaaatatttattacaaacgattgcttatgctaaaaagattacaggttgcgataaactaaatttaatttgtcatagtatgggcggccttcttggacgttcttacgttcaaagtgacgaatataaaaatgatgtgaatcaacttataatactctgcacaccaaacgctggatctccaccaaattatagttattggactggaggcagtctccctatccatgcctcttctaaaataaatatcgttcatttttatatggaacaatatatttgttacttaagcatcttacataaaatcaataaagttgaggcgatacacatttactttccaggattacaagatgttattccttgtaaagattacggaaattatttatttataaaatccgactcttctattacatttcttccttatagtaagatgaaaacgaaaaaccctttcctcgatatattaaatacaaatagatttattatacaaaaaagaaatattgaaacgacactcattgccggagatggagaggaaacaactcaatatttacaagtcgtcccttcacattccaaactgaaatggacagacggcaaagtcgtcggtgatttacttacaaaacatggtgacggtaacgctgttctacatagcgtttttcttctagagggaaataaatatgttttgcatgcttcacataacgaagtgctctacaaaagcattcctatactacaaaagatactctaagtttcaaacaaaaaaggtatggcattaagccacaccttttcacattaaacaaaatttctcgcgtcattatttcttccaaacttataaatagcaattaagaagaatgcaattgcgaaagcgaataaaattaaaatgtttaaatacaactccgagaatggtattccctgctgcagttttgatatcgtatctaacaaccagcgctgcggaagaaaattagctactttttgtactgcacttggcataatgtcatatgggaaataacatccagcaagtaagcatgttggtacaatgatcatattttgcatcgcatttgccgatgctgagtttttcgaaaaagctacaaggactaatgatattccaattgcgattaatgcaaatagcattagtacgcccatcatcactatgaaaggcatattgatattcgtatgaaaaacattcgttaggaataggattgtaatcaaaatttgtactgttagtattatgatatttactccgacattagataatataaacttcttcccatctatcggcgttgataatagtctaaagtacgttctattctctttttcttttaaaatatgacctgataagttcgctgctgaaaacagcataaacataataaggtaacccatcgtttgatttgtcatatctttatttttcgaagtatcttctagcgtctcagttttcattttaaatgaacttttttgataccctgcgtacatattgtcgaatgtgctttgatctgttccggctactttactaatagctgctatattatcaatataattatataaatatgattttataaatcctgttacttgatcacctttaatcgatgaaatttcaatatgctctggtttcccttctcgaacactttttgaaaaaccagaatctaatgtaataactccatcaagttttttggaagtgagtttatcttctatttgagactccttaaccttactcacattcacatgatttaatccttctaaaaactttatcgtatcatttgctatcggctcattttctttatttacaatcccgatatttaacgttccttgccctgcatttccgtatatcgagaaggaaatgagcgtccctattatcggcaagctaattataattagtaaactttttttatttttcaaaagcacagataacgttttttgtatgagccataaaatatccttcatactatagcccctcccgtctacgtaatgcaataattgcaattaataaaaagagtgctgaaattccaatgtttaaagaaatgactggtagtgctgcccctacatcatttgcataaataattttcataacagctgtatttgcccaagttaatggcgataaattcgtaacgaaattttcttctactacgaaatatgcacctccaaaaatagaagctaattgcacaacaaccataataattgccctagacgcttcagctgttttcgtgatatatccgattcctaaaccgaagctaattgctagaaagacttgtgttaataaaataagaaatatgattccaagatggtcgccccaattcgcttgaaaaacaaatttactaaataacatgacgagtaatatgcacagggcatttgctactaggctaccaagtacttttccaatgaatatttcagctttacttataggtgcagcaatgagacgatctcctgttttacgtattcgttctcctcgaattaaagaactcgctcccatcgcagcatacagtgcaatcatcgttgtcattacaaccgcgtagtaatccatagaacctggttttttcgcagcttgtaaagatgtttcttttatataatcattatggtttccgtttgaaataactgtgctcaccttagtaggatctacttttgcaacttcgaccgctacattgtacttatcaacaaatgttgtaagcattccttccacaatactcccctcaatactacttttgtcacttccgtaaaattttgcaccatctttatttaactctacataagcagcatatttatttttcttcacttcttctttcccatctatactgccggaagcttttttaaaatgaatacctgatttatccacttctttcgtaaatgctgcaaatgattgagaaaacgtgctactcgcttcatctttatatagcacttgtatatctttaatcgaatgactatcactattaaatgcgttggttaacgctgttcctaacacaagcataagtacaatcggaaatgctaacataaaaactaaagttcttacgtctctgaaatctcttttaatatgcataattgcaatattgaagatgttcaattgatgaacctccctttaccttttcttcatttaccttttatttatctcgtaagtttcttccggttaacgtaagaaatactgtttctaagtttggagcctgctcctctaacgaacgaatttcaatgtcatgattaatgaaatgctgaataatttgatttaaattatttaatcctgcatccgagtttaccttgattacgttctcttcaatttgaacagctttcacaccgtttatctcttttaacttttctacatctaaattttctactgacttcacttcaatccaaatatctttcgtatctgtaataatcgcttttaactgttctttcgtaccttctgcaatcactttaccatggtcgacaattgcgattttcgtacaaatctcttctacttcttccatgtagtggctcgtgtaaataatagtgcttcccatttcatttaacttccggacagactgaagaatatagtttcttgactgcggatcaattccaactgtcggttcatccataataattaacttcggtctatgtgcaattgcacaagcaatattcaatcttcgtttcatcccgccagaaaagtttttcggataacttttatgtttatcgctaagccccacaaattgcagtgcttcctccactctcgcttttagctcaactcctcttaatccgtacaacccagcaaagaatttcacattttcataggcagttaactcttcataaatcgcaatatcttgcggaacgataccgatattcatcttcgcaaatcggttatgtttctttatattttttcctagtatgctaatttcgccttcattacttcttaacaaaccagcaatcatattaatcgttgtactcttaccagcaccattcgatcctaaaaagccaaatatttctccttctttaatagataaagacatattatcaactgcgatgaaatcaccaaattttttcgttaaatttttaatttctaatgtattcatcatttcacccctatttcggtttctctgcttttagtataaacaaaaagaatgaacctgctcagtgcagaagttcattcttttcacatgagattattcacttttttcatatgagatgattcatcctcatatcggcaacaacattgttactgcaaaaccacttgttccatctacaataatttttccgtttactgacgctgttcgctcctccatccccataatcccgagacctttcttaacgagaaccgcaccttttccgttatccttcacttgtactttcaccatcttgttaagtacatgaatatcaattgagatgactgtcgcatcagcatacttcatcgcgttcgttaatgcctccataacattttcaccaataattttccactgtatcggagaaatcatatctaagttccctttataaacgaaaggaatattcacatcattcttaccggcaaattcctctatgaataatttcatacgatgaataccaatttgctcagttggtggcttcatatttttcaatgtaatgcgaatactttcaattccatcttttgaaatgtgaattgcattttgtaataactccgcagatttttttttatctatttccattaacctctttgctgcctccatttgaataagtgcacccgtcatcgagtgaccaattttatcatgaatttcttgcgataaccgatttctctcttctagcttaaatgtgtattcagattgtcttatgtactctttattttcatgtaagcttttcgtaagtcgttgcatatcttttcgcatcttatcattttgcgattcaagctttactacacgcgatatatatcgatctgcaatagttaaaacgagaaaagaaaatgcaacaattaatccataagtcattcgaatactttcatctgcaatcgtaattgggagcatcataacgacaaagcgtggccaattcttttctatgtaatagaatgtaatttcgtataagttcaaagataaaaacaaaataaaaaatggatgaaccctccatgtaaataacataactacgccaatggatatacagattaatatttttttatacgtatcttttttaaatatagaaatcattacgtttacagaaaggtaaataagtaaagtaaatataacccacggtaaatttgctacatttgcgtaaatataactgaacacaatatataaaaagacaattaatttacttacagttaaccaaaattccatatcattaatctactttccctgttaagtaataaatcgcaatttgtgtgcgatgttcaagtccagttttccctaaaactgacgtaatataatttgcaattgttccctcagatataaaaagctgtttcgaaatttctttatttgagaaaccttttgcaattaatgcgataatactaagctccctttctgtgaaaaggctcttatcaattttacattcttcctctttactttccattaaattagacttaattttatcgaggacaacatcttgcataacagtttgaccgttatatactccttttatcgcatcacgaatacgctccggatcgttattttttaataaataacctttcgctccgttttttactgcatccaaaatatattcatcatcatcaaacgtcgttaaaataagcggttttgttttcgtctcttcacaaatgaacttcgtcgcctctacaccgttcatatttggcatacgaacatctaaaagagcaatatcaacttcatgctttttacaatacgctacagcttcttccccatcatttacagtatctactacttcaaactcttcgtatgtatttaaaataattttcataccttctctaataaaagagttatcatctgctattaatattttaattttcatgtttgttagtatggacctttccctactaacattcacatcctttctccgtgtaacatttcctacttgctcattatatacttctctttaccattttttcacaccttttttcatctagctctcccgcaaaaaatatattattctttttttacaaaatgtgtagggtgacttatcattctttacgtctatataatagaatgcgtcaaaaaggagggagagaccgattgaggaaaaacaattaattgaaaaagcacagcaaggaagcgagcatgcttttcgtatccttgtacaaacatatcgtcattatatttttcaagttatcttttctattttaagacatgaagaagattcgaaagatgttacacaagaagtattcgtaaaaattcacacctctctcccaaattatcaatttcgcggattaaaaacgtggatggcacgtattgccaccaatcacgctattgattataagagaaagaaagctagagaaagtgaagaactctccttatgtaaagaagctgaagaaaatatacagtcctctcataatattgaggctttattattgacgaaagagcaaaaattactcattgctcaaaaactgcgagaacttcccgaaaattaccgtgacgttgttctcgcacattacttagaagaaaagagctatcaagaaattgctttacaggaaaacatcgaagtaaaaacagtcgaaatgaaactgtatcgagcacgaaaatggattaaaaaacattggaaggaggaagagtttctatgatgcattattcaaaagaagattggcgcaattatacattagattttatagaaagtaatgaacgtgaatctatggaagaacatctttatgaatgtgatcattgtttagcactttatatggaaagtattgatgaacaacatgaaaaccttccaatgataaatgatgattcatttacgaacgaagttatgacgcaaattaattttgaaacactacagtctaatgaaaatataaaaacaacctcactaaagcgcacgatcattcattacataattgcgactgcggctacaattatttttatggtaagtggtttatttcagtatatttttacagcgacatcaaatttagagaaatcttcaaaacataacgagtcttctatttcacaacaaattgtaaacaaatcggtagacacatcgaaaaaggacggaggttcaaagcatgaataaaaatccctttttagcacttgtattagggctaattcctgggcttggacatttatacttaaaaaagctaggacggtttattttatatagcgggggatcactatttctattctcctttgcagtattttgtaccatagtagtaagagaacgtgatattgcttttctttctctatttttactagctgttctatgggtaattaacttactagatttagttatcaccattataaaccaaacgaaaaagcaagaagctggagaagtgataaattcctctaaagagagcgaacgattttatatcattctcttatccatcatccctggacttggccatttccaattaggacttatgcaacgcggacttacatttttagtagcttgcacaggaatcggaagtatgatcattttcgttgcacttttaacatcgcaagaaagttttcttatcttccttattacgttacctgttttatggatttataatttctttgacgttgttcagcaactacagaaaaaagaacgtggcgagcaattaattgaccgtactattttcgaagattttgaagagcaccgcgagcagggaaagaaaagtaaaacatttgcttctattttagcgatgttccctggagcaggtcatatgtatttaggcttacaacgccgtggtcttcagcttatggcggccttcttactatctatttatttactcgacttattaagactttctgcgtttttatttttagtaccaatcatttggttctatagcttttttgatgcgttacagcaaacagcaaaatacggaaaagaacgagttcaagacgaacccattatcgattattttatcaatcatcaaagatggatcggtatcgggttaattacactcggtggttattatttattagatcaaacagtccttcctattttgaatgattactttgcaactatatttaacattcatcttagcgagctatattatcgctatttccaaacatctatcgttgcacttctcttaattggcggcggctttaaattgttacttggaaataaagaaaacaaaggtggtacaaaagaatgagaacatggcgtgttggaacattctcaatggggctttctattatatcgttaggatgctttttacttttttcagtcgtaaaaggaattcaagtattagatacactaactgcatggtggccagttttactcatcatacttggagctgaagttttactataccttctattctctaaaaaagagcaatcttttattaaatatgatatttttagtattttctttatcggcgttttaggaagtgtcggaattgctttttactgtttattatcaactggattactagaagaagttcgtcattctattaacacaacgaggcaaacgagtaatattccagacggacaatttgatatacctgaatctatcaaaaaaatcgtagtagatgcaggacatcagcctctaacgatagagggaaataatacaaatcaaattcatcttttgggaacttatgaaatgacaacgaaagcaaatgaaaaactcaatttaaaacgagatgatttcctttcagttcaaacggctggagaaacgatgtatatcactttaaaatcattacctgttcagcatacgttatttaattcagcaccacaggtgaaaccaacgcttgttcttccgcaaaataaaaatgtggaaatccgtgcttcaaataacgaactatctctttatccaggtcaattgcaaaataattggtttgtacaggaaagctcaagagtgtctgtccatcttgcaaaagaaagtgatgtatctttaacagcagtaacgaatcaaaaagaaacccatggaagtacaccttgggaacaagtagaagatttaacgaaaaacgaaaatacttcttcagaagaacatccagaattaaacaaccaagaacattggtataaaaattcgattaaaactggaaatgggacgtacaagttaaatattgagaaagcttataatttgaatatgagtgttctcgaaaaataaaaaaccttccgcaattgcggaaggtttttctcatataatcgctttaattccttctaacactaatccaatcataaatccgcaaaccgccccgttcactcggatccactgtaaatctttaccgacattattttcaatcatttcgattaacgttttatcatctaacttatcaagattttcttgtacaagcttaccgattttcgaatggttcttttccacaagtgtgacaacttgcttttgtaaccacttctctattttttgaacagtttgttcatcttcttttattttattcatttgtttttgtaaaaatggaataacatatttatcagcaaattcttcattatttacaaaagcaactgctctttgctgtacttgctctagcatctcttttattttgtcagtagcattccaattcgcaatccacttttctttccaattttctaattcctgtaataaggcttcattttcttttacattgataatttcttgacgaatcttcgctaatataagttgtcttgtgctattatcagcctcttgtaagctgttaatattactaatgataaacttctgcaaaatgccgccaatcttatcttcatctacaatattcataaatgatttcaaagtaaactgcaagaatccatctacttttatattttccatcgccttcatacctaagctaccgagctggtaacgagcttcatcttgcgctgtccaatcttttaccttcactaatatgtaatcaagtgtcttttcatcatattcttgcactactaattgatcaacaagcacttgtaaaatgttatttgtattaattgtatgtaaatacgtctttaattctttttcaataataaccgctaatttttctgtatcgattgaaacaatcgccttctcagcaatcgttacaatgccttttttcacagcatcagactgcatttctctctctgcaatttgtagcaccatttgtgctagctgcatttcttttactttattcgtaatactttctttcgttagccactcattttctaacgtattgatgagccctttcgttactcgtttacggtttttaggtaacaaagctgtatgcggaattggaattcccatcgggtgacggaataatgctgtaactgcgaaccaatctgcaagcccgccaactaacccagcttcaaatcccccttgtataatctctccagctatcgttccttgaaaagggatagaagccgcaaagcctacacccataaccccaagcgaaatacccgctatatatttagtctgtaatgacatcgtatacacatcctcttattatgtaaaataaagcttttttgttgtatttattcaatattagttatcctttatatatactataaagaactattgtgaaaataacaaagatttttatgtacatgaaaaaatgaggctacaattagcctcatttttcttataccgttaactccaaacctttcctataatattcattcattacatcttttggaaccatacttccacccgttccccacacaatatgagtaccttttttcaccttctctgttaactgttgcttttgtaaatactcatcttctttacatactttcactggccctatcatacctgctagtgcagaaggctctaaataaatattctccgtgtcagctagttcttttaacaatctatataactcttcatcgcttactgtgtaattcccactcaaaaatggttccatcgttttaccgacaaatccagacggtcttcctaccgctagtccgtccgcgtctgttacattatcaatcccgatatcttgaacagcaattttatcatgaagtcctgtcattaaaccgagtaacatgcatggagagtgcgtaggctccgcaaagaagcagtgcacgttgtctttatacaataactttaaaccaaatgctaccccgccaggtcctcctcctactccgcacggaagataaacaaataaaggatgattttcatctactacaacctctaactcttctaattgcttttgtaatcgcaatgctgctactgcgtatcctaaaaataaatcatgggaattttcatcatctacaaaataacagctaggatcggcatctgcttgctgacgcccctcttctactgctttactataatcagcttcatactcaataacgtttacacctttacttcttaataaatcttttttccattgtttcgcatctgctgacatatgaaccgttacgttaaaacctagtttcgcactcataatcccaatgcttagccctaaatttcctgttgaaccgaccgcaattgaatatttggcaaaaaactctctacatgtatcactatctaaaatggaataatcatcttcttctgttaacataccgtgctgcaaagctagttgttcagcatgtttcaacacttcataaatgccgcccctagctttaattgatcctgatatcggaagatgactatcacattttaataataattctcctaaaataggttgcttgtaatttgtctctaaagcttctttcatagaagatattttcactaaaggtgattcgattatgccattcgtccctttcgtttcaggaaaaactttcgcaatatatggtgcaaaacgctttaatctctcttccgcatcttttacattctcttcattaagtggtgaatcttttattgccctttcatacttttctatgtttggatttatccaaaatacttcttctgttgcaataagtttattcactaatgggtattctgcttgtaatgcccctatttctttcattttgtttcctccttatatccttgtagctcaccatataataaattataattaaattaattttaatatagtttaacacaaatcgttaactttagttaattttaatttaatttatttaaatataatttaataacccttaaggagattttcattatggaaaatatagatattggtaaaaaaattgaaaaacaaagaaaagaaaaaggtttaactagtaaagaactagcaaagatggccgatattacaccatctatgttaagtcaaattgagcgtgggtccgctaacccttctattcaaacattaaaagtgcttgctaaagctcttgatgtgccaacatttagctttttacttgaagatacaaatacagacgatttaattgtacgttcccataaacgaaagaaaatgattatcgataatttatcatatgaaatgctttcacctgatttcactggaaatttagcaacagcaattatgaccgtcccgcctaatacagcttcatcagaaaatgtgctagaacataaaggagaagaattagcatttgtcttagatgggaaaatcacattatatttaaacgaggaagaatacgtattagaaactggcgacagtgtaaagatacctgcttatttaaagcataaatgggtgaatcattttgagaaaaatgcgatagtcttattttctgttactccgccgattttttaatatatgtaataaaaaatagccatgtacggggaatatccgttaatggctattttttattttttcggcaccaacaaaatccctaaactaataatacaaaagctcattatttgctgtgctgatagaccaaactgtaccgaattttgttcactaacaagcgaaataatgatttgagcaaacccctcaacaattagaaaaatacttatattctttccatttccgatcctttcatttttcatccataacaagcccattatacaaaggttgaggataatctcatatacaaaaataggatgatacaaaaatttagattcgtatatattcattccccatggtagtgtcgtttgtacacctacttcatgatgtaatagaaaataaaagataatacttacacacagaccaaaaggcaatgcatcaagtaaaatacgaagcgaaaattgttcctttttacttttccaaacaatgtatacactagcaattacgcatcctactacaatatgttgcatacttcctatagctaataatgcttgcaatggcgatttaaaagcccatacaggatttaaaattgctggtgcaaacttccatacaaatacgatgataataaacgcatttgttacggcatccatcattttttcatatgatgcattttgatgcctcatctttcgtttcatcaacataaatccaaatagacttccaattataagagatacgggttgtaatctcacgatccactccatcatcacgaaatccccttttagctctcaatcaatttcttaaatttcttttctaattgatctggtggtaatacacctcgtacatgatctactataattccatccttattaacaaaaaatgtcgtcggtaaagagaatactttataatctagtccagctactccgtccatatctagtagaaccggaaactcaaatccatagcgattagcaaatgcgcttgcttcttgtactgggtcactaacagttgcattcaccgcaaaaatttcaacatcctttttatatttatcatacatatgaactaagtcaggtgcctccatttcacacggcccacaccatgatgcccaaaaattaataatatatggttttcccttggcatcatttaacgactgcaactttccgtctaatccttttaatgtgatgccaggtgctttaaaacctacttgtggtaatacttctttctcttgtaactctgcttgctttgcttttctttccttttcttctttctttgaattataaaagttaacccccgcccaagcgagagcacctactagtataatagcaattagtttcttcacttttcttcctcctcatttttaaaaacctgtaaatccaccgaatagacgaataaagaatgctgtaattttcgtcatttgatttgtatacaataaaatacctgtaatatatgataaataagatatatatagcgataaaaagtataatgatataaatgacaacactctatccacactacatagagtagtgtttaccctaaaaaaaagaggctatatgcactctccgacaataagtacaatcgacacccagaataaccctactgttacatataccgagttcgtatgtaacggaatagtaagcttagcaaccttttcatttaacacttgctcgattcgtaaatttattgctgtttttgcaaatgaagctgtaacacatcgattttccattgtctttattttaattaattttaataacgcgctacctaactcaaatgaagattccattttttgcatcgcatatttatctgctgctaactcttgatacgtatgatatcgttgtaacaattcttttaatatcgggatgtacatcattccttctgctaataacgtaaaacaaaataattttagcggatcccaattattttgatgatattcttcatggaaaataatcgcatcaatctcttcatctgaaaacgtctgaagcaaaccttccgacatgacaactttcggacggaataatccaattgtaaacgctgcaacttccgcagtcggcagtatatatatttgtttcccttttctaataaatgggataagtactttttgtacttttttactatagaaaaattgccgccaaattcttttacacacaatcaatacagtaattaataataaccccgctattataatacgaaccattgatagttctttcatatgtttttctaactgaaacaagcaaaactttgaaaggaagaatgccttattttgaaagagaaatggatatgtaacataatacaataacaagctgaaaaagagggtactaacaatgagcgctaacaatacgattttacgcatttgccatttcatttcatcgatcctctttttttaactgattcaatttgtcttctaatttttttattaaattcggatcagcctgctctaactcatctatcatatgtgttataactaaatctccaaattcccccactaattcctgtgtcattttcttcgtttgattggataagaattcttctttcgtttgtatagcacgatatatgccacttcttttcacagtctgtttttctaagtgtaatttctctactaacctgttcataactgtcataacagtattaaaattcacaggcgattcttcacttaatttctgctggacttctttaatagtaataccttcagtagaccaaataatctccataatcttcgcttcaagcggtccaaagaaatgatttaatccttgctcatttaacctatagttttgcgtaaacatcgtatgactcctttcacactacgaattgtagtacaaattaaatgagaggtcaaacgcaagtaatacaaactaaaattcactacctataaatacgtacatcattctattcattataagcctaacttatctccaaatgtatcaaagagatactgctctaatatttgtacactaaacttttcattacgtccaagtgcaaataattcccgatctttcgctacgatagtatctaacggaataactacattatccactatttttgtaatttcaattatattactttttacatttacttctgttttaaattcaacgttttctaacactatatgtgaacgtcttcctgatgcaaaaaaagtaaaattaggatttttaacaacgccaatttcagtctctaacgcatataaatagtgaaaaattacatctctatgtccatcttttattattttttcatccttctcatcgtctaagtattctttcagcttcgttgtaaattcaaatcgaaaatccacttttttcacgctccttctttgtatttcatattaaacaaatatattgaaataattttaccatattgtaatacaacttcctattaaaagtaaaaactgttttagaaaatcgctattatttccgatacccttttaaaatataagtataaattcaatatgaatgaatgcttcattacatctatttaaacatattttttccattttttgaaacattagtatgaaatattatatatcaatgaatggtttctaatgtattggtatatatagtcggtagtttctttactattccgatatacttaagctacattttctaattattgattacattacggaaggaatgtaactctcttctatcgaatttttatataacaaaaatgattaggtggtgctttactatgaaattagctgtcattggtggcggtgatttacaagattcaaatcacttgcctattaatgaacgccttatagaattaacaaataaacagtatccaaaagtattgtttattccaacggctagtcatgatgatgaaagctatataaaattatttttagacacgtttgaaaaacaattacattgtgaagtacaaattttacgcattacaacagattcaccttctaagtatgaaatagaggagatgattcattcagccgatttaatttatctaggtggcggaaactatattcacatgcttacgcaatggaaagaacatagacttgatgaaaaattattattggctctgcaacaaggaacacttattgctggttatagcgctggtgctatgtgttggttcacgtctagtatccgatcagattatgaaggttctggttacatagagagtaacggatggggtattgttaataaaagattttgtccacattataatcaattaaacagaatgaacgccttccattcctttttacaaaatcatcaagggaatatagaaggaattgcactggaggataattgcgctttatatattacagaggaatcctttgagattatcggtgaaccggaaaaagcgtgggagttttatatgagtgataaaacactcattagacaacattttgatataactttaaaaagctatttgtaaacctgcacttacgaaaaaatgtccctaagtctaataacttagggacatttttctatttaactaactaatcgtgtaattcgtttcttttgccatgaaagcttataatatgcatactgcaatagtaagctgacaataaatgctgctggatacccgatccaaatgccttctattccaagacttgtatggtaagaaagataatatgctacgggtacttctacaagccaaattgaaacaactccaataacagttggccaaagtactgtaccgctcgctcgcattgtcgcactaataatttgtgcatgaccgaaaattaaataactccataacgtaatcataactaagctatgagcaatttcaattgtagtttgactcgttaaaaatagtgataaaatgtctcttgagaataaataaataagagatattaacacaccaccgatgacgtagttcataataattccggccttcacaactttctgcaatcgatcaaattgattcgccccaattgattgtgctgcaaaaatagaaactgtaataccaaggctaactgctggcatttgtacataacttgcaacttgattcacaacgccgtaagcagctgttgcatccgaaccgtaacgatttacaaatgcgattacggcaatctcagataatgaaactaatatcatatttatacttgccggtataccgagccttagcaatagctttaataactccccatccattcgaaggtattttctaaccgtgccatctagttgtaatgggtgatttttcttctttaaatacacaagcaagacaataaacgtaataactgtagatataacagatgcataggctgctccatacacatctaatttcggagctcctaaccatccaaaaataagaactggtaataaaatcatatttagtgctgtacttacaattaaaaagtaaaatggcgttttagaatctcctgtacctctcataaatgttgtatatgcgaaatataaaaataatactggcatcgatataaataaaatccgtgcataatgtacacttatttcaataatattttctggcgttcccattaggcgcataatatccatcgcaaaaatacttcctattatcgccaacacaactccaataataaaggtaaatgtcagcgtcgtaccaacgatagcttttaaacgatcttcgtttttagcaccaaacgcctgaccaattaaaatagagctccctgaaccgataccaattacaaatgaaacgagcaagaaaaataatgggaagaatgctgatatggccgctaaatcattaactccaagccatcttcctactactaccataccaaataattgtccaactgattgtagtacattacttaataataacggtactaaaaacatcgacatcgatttccaaattggtttactctcactttccaacttatgtgactccgcaccttctttattgttatctgcaggtggtttcaaatttcatttctccttttcttaaaaatctattttcaatatctatctctttgtatagttgttataatactgtgcttctattcattttcttttcatatgattataacttcacccaatattgacttccatcggctgttcgatctaaaaatccatattcgattaaatatcttcttaacgttacgaaatcagggtatacattttctatcactgtatttacttctttttcagtatactttttattactatcaaacttcttcactaaatgacgcaatataattaatttacgcttttgtttcttcggaaatttagagagaggtccatctaacccttctgtaaaatgagcttttaatacttcatcattttcttcttccgtaatattgtatcgatcatccaccatcgttgctgttctatgaattggtacaaatttggtttgtacttttgatttttcttctgataattccattagcgctaaaaatacttttgcttgcttcattttctctcgcagtgtaaatcgatgattacgaattgttgatgtacttccgccatccaactcttttacaatttctttatcattcagtcccatatagaaaaactgaaccattttcttttgtaaatccgttaatccagtaaatttcttatccatatttagcaaataatcaaacatagacgtatgctcattttgaatatgcaattggacgaacttctctgcttcatacaaaacttgattatcttgataaataacacctttaataaatgtttcaccacaagctaagcaaatgtacccctctttttcttcattaaacacataccctttctttaattcctctattgacgcatcccaaaacttctctgaaatatcgctcatactaaacactccttcaaaatgtttgtttaaaaaccaaacaaatcgctatatcgtttattattacttcatcatcttatcacaacacaaacaaacatttcaacgtttcgtttgcccattttataaacttttataaaaacatctatcgaaaggatttaatacaacgaaaagcgaatatgtttatacaaattcattttataggatgtaaaatagaacatgaatattcttcaagacccttggtttaccgttaagtaaatggcacagaacgcatatgcgattagtgaatatggaactggtattcactcattacaaaacttcagtattcaattttaactacaaaaaagatgctttcgtataagaaaacatcctttactttttatatattctatttacagtctctactaaaaccttacttgcttgtacaaatgtatgctttcgatttctatcgtcaacaaatttattagcacaactactcataatcatcatacaactaattatgactaacgctatctttctattcttgtaagtcactttatgccactccactattacaaaacttcttttgaatttatcccatcaagaaattttacatgaataataaaacgtgtgaatatgcaattctgcatattcacacgttttatcacaatgttatgatttaatttagttaaagaacaagtataccgaggtgactaacttgaaatttaaagcgaaaaaaaatccattccacgtcattttcattacattatttataattatttttttcgtttcgttattcttccaaaatgaaaattctatttttttcactctcatgatgctgctaaatatcgtgaatctttcttcattctatttctctcactacaacgtaacggaatcatctcttgttgtaaaacacggtttcatttttcatactgaaattccatttgaagatattcgtcacgttaaatactctggtaaaaaacttcattcaaaaaaatggactagacaacaattagaaatccattacaatttatttgactcagtgaccactttcataccactagaagaagaaaaattcatttcactcttaaaagagaactgcccacagatgaaagtaatgaatacgcctgctaacaaataatatattttgaagcttgtagtattgcaagtagatgaaacataaaaatgaacatcaaaaaagccaagattctatactaagaaccctggctttttctattactcttttggagcaatcattttctttggatctacaatttcatcaaattgctcttctgttagtagcccagattgcaatgctgcttcttttaaagttaatccttctttatgagcatgcttcgcaattttcgctgcattttcatatccgatatgtgggtttagcgctgttacaagcattagtgagcgattcacattttcattaattacttcttcatctgcttcaataccaactgcacaattgtcattaaacgaaacaattgcatccgctaataagtgagctgattgtaagaagttataagcaataacaggtttaaatacatttaactcaaagttaccttggctcgcagcaaatccgattgttgcatcattccccattacttgcgctacaaccatcgttaacgcttcactttgcgttggatttactttacctggcataatagagcttcccggttcatttgctggaataataatttctccaagaccactacgtggaccacttgcaagccaacgtacatcgttagcgatcttcattagatccgcagctaatgcttttaatgcaccgtgagtatatacaacttcatcatggctcgttaatgcatggaacttatttggtgcagaaacaaattgtttacctgtaaattgactaatttcctctgataccatctcaccaaatttaggatgagcattaatacctgttccaaccgcagttccaccaattgctaactctttcatatatgtattgctctctgcaatcatacgctctgttttttcaagcatacggtgccatccgctaatttcttgccctaaagttaacggcgttgcatcttgtaaatgtgtacgaccaatttttataatatgttcaaatgcagttactttttctgctaaagtttcttttaatttcgtaattgctggtaatacgtgattttctactgcgattacacaagctacatgaagcgccgttggaaatgtatcatttgaactttgtgacatgttcacatcatcattcggatgaatatgtacgtcagatcccttctctttcaaaatttgattcccacgatttgcaattacttcattcacattcatgtttgactgtgtaccactacctgtttgccatacgacaagcggaaaatgttcattccatttccctgcaatcacttcatccgcagcttctacaattgcttctgctttttcttctgatagctttcctaatttttgattgctaagcgctgcactcttctttaaaattgcaaatgcttttacaatttcaagcggcatttgctctgttccaattggaaagttttctttactacgttgtgtttgtgctgcccataatttatcagctggaacttttatttctcctaatgtatctctttcaattctgtactccatgttttcatccccttgaaaatataatacctacatctcttataataacagactttctcttaaatgataagaattctcactcttatatatagatattctatatttatttaaaaaaattcctcttgacctaaacttaagtttaggctgtatcctttccattgtaacctactataacattactggaggaattcaatatgaaaaaatatgcttttataacaggtgcgaataaaggaattggatatgaacttgttcgtcaattagcagaaaaagattatcacgtatttttaggtgctcgtaatgaacaacttggacaacaagccgtagaatctttaaatgtttcaaacgtttcctatattcaagtagatatttcaaattcacaatccattcaagaagcaacaaagaaaatttacgaaacgactgatcacttacatttattaattaataatgcaggcatagcgctagacttcaatatgctacctagtgaattaaatattgaaactttacgccaaggatttgaagttaatttttttggaactttccaaatgatgcaagcctttttgccattattaaagaattcaagcaacagtaaaataataaatgtaacaactgacatggcctcactaacaatgtttgctaatggtgaaacacatccaattaatacactaggatataattcttcaaaaacagctattaatgctttaacattagcttttagtaaagaatttgccactaacggtccagaagtatttggggtaactcctggttttacaactacggatcttaatggaaattcccccggtggccatacaaccactgaaagtgctaaaattattattaaatatgcattaagtgaaacaaactataatggtaaaatacttaacaaagatggcattataccttggtaataaaaggatgaatgatatgtattatacaattgggcaagtcgccaaaatgcaacacttaactatttctcaaatacgttattacgataaacaaggactgtttccttttctgcaaagaaacgaaaaaggagatcgagtttttgatgaagaagcactgaaatatttagagatgattttgtgtttaaaaaacactggtatgccaattcaaaaaataaaacaatttatcgactggtctatggaaggagaatctaccatccttcaaaggttagaattaatgaaacaacaggagaccaatgtcttacagctcattcaagacactgaaaaaaacttaaaaaagatacaacaaaaaattgctaaatatgagaatgaaataacttcagcaaatgctattaaaaaataaaaaaatcaccttctacatattgtagaaggtgatttttattttatgatgcttgctttcctttatctgcatcatctacataccagatgaatttgcctgtatatccgtaaataactgctaaaattaacgatacgaagcttaaccacataaacggaacgtatgagaacgttgctacacctaaaataccagccataaaaataccattatcagaccatggaaccatacctgaagttaacgttccacctacttctgagttacgcgctaatacacgacggtctatttttaatttatcatagctatcttccataatttttggtgttaaaattagtgatacatacatcgcacaaccaaatatattagctaagaatgccacgattaatgtagacaatgttacattacctgcagaatttaatttcttctcaaattttgatacgattacttttaaaacacctagtttttcaagtaatccaccaaatcctaaaccgaaaataataacggctactgagccaagcatgccgttaattccaccacggtttaataacttgtcaacaaactcaacaccagattgaattgagaatccgttataagctgttccaatcgcctctccaaagttcatcccttggaaaagggttgcccaaattgcaccaattaaagctcccattgcaattgttggcatagacggtttcttcatcgctaatagaacgataacaatgaccgccggaacaagcatccatattttaatatcaaattgctttaataaagcttcttttaaaaattctactcgattcaaatctacattatcgccgccatacatccaaccagctacagtaaacataatactagtaataatataagctggaacatctaatacgagcatagctcgaacgtgagcaataacatctactttcgccatagaagctgcaagaactgtgctatcagaaagtggtgataatttgtcgccgaaataagctcctgaaagaactgcaccagcaacaagcggaagtggtaaaccaagtccttcaccaatcgccatcatagcaatacctgctgttcccactgttccccaagacgttcctgttgcgatagaagttatagaacaaataattaatgttgctaataggaatatgctagggtgaataaattctaatccataatagattaatgttggtactaccccaccagcaatccatgttccaattaaagcacctactgcaactaaaatcagtatcgcttctaatccgttagaaatccctttcgtaattgcatcttgcaattcttgataacgaaatcctaatcttaatccaagcgcaattactaaaaaccatgaaataaatagcgctaattgaattgggagatcaaaaatcgtttggaaggaaaagacaacagcaagaaatagtaataaaagaactatgatttctagcatcgatggtaatcttacacttttcatttttttctctccttacaagtcgataacatgacgtatgtcgtcttacatgtatgtaatatacaattagcgaagacaaaacaaaattttcatattatttcgatttatttttccagtataatatattcacaaccctttctattgtaaaagtagattacgtttttcgcaatgaaaaatataaaaaatgttgtatttttatttatcccgatattttcggccaataagacccccgtctcaaaattcagtaagtgcaaagcacttaggtaagaaattaaatactgtaaaattccaaattgatatgaacgtattaaagcttcactttatttacaaagaaaaatcccatactaacttttttaatatttgctgcaataaaactttttacaactatcttcgctttttaattcacaccattattttctacataaaaaatagggcacacatcataaaaatgatgtatgccctatctttatttatacatattttgtatttcttctttatttttaagtatttcctcaaacttatcactacaacccttcggaaataacactcccagtccatatgaatgcgcaaattgaaaatgagggtacttcgcttttacctcatcccaaaacttatatacgccgaaatcactacttctaacttcaatatcatgaaataatacaataccgtttttcgcgactttcggtagccatgtattataatcgtgagaaacagcttcatacgtatgatagccatcaatatgcaaaagatttatcgtttcatcttgaaaccggtctacagcatcatcaaaagtagatcgaattaaatttcctatattaaggtagttatcgctcactactttttctactatttgaaaaaccccttctccatatggacctgtatgcccatctccagcccaagtatctactgcaaagcatttagtcgataaccctccatcttttactccctgacaaaaactaaaaaaggaagctcctaaatgtgtacctaactcaactaaagtttctggtttttcaaatcgtactaagtcatatgcaaaatctaaatgtccactccacgcagattgtgaccgaataataggactaaatgtttcaaattcaaatgatggtttatgagtaacccagttcatcgcataactccttctgcacatatttttaacaaaccaaattactcttatctttatttttttatcgccttgattatgattctatttcatgaaaatatgaagaatttattcttttctattgaggtaaagcatcatatacatatgggtcagttggcttattaattttttcgattttgtttacttttacaagtggaaagactgttcctttatatgtcgtttcatctaataatcctgttatttttacccatgtttcttctggaattttttcaatatttttcccggtaacaatcatcccccagactgatgcatccgcaatacaacaagttatgccatatcgagccactactgctttattccccgtcacatctttatccttatatataaaccctaagaatgtaatttctttccctttaaaccaattaacattttgaccaattacattcattgtttgaacataatccttatcctttacttgtagtttacgctgtcctaacatactttttactacttgctcttccgttttataagtcgttgctaaatttgatgtttcttctgaatcaactgatacttctcgctcatcaaacttaacctgtttcccctctttttcgtttctttccagacttctcgcctgtacactttgattcatacccctttttcctcctaaacttccatcaattgttacacttccaaagagaaaagcactaactatcggaacaacaaataaaacatatacaaagaaactttttatccctgattttgatgttgtatgatgtttacaacaattgcaatcatgctgtttttctcttccatctccccaaacttgtacaataccaaaaattaaaattactacaaaagctatatacgtaaatttgatcatttttggagcgataaaattataaatattccctgttacaagtagtttaaataagagcattgctaaaccaattaaaataatgccacgaatatagcgatgatatgccttctgctcctctttctccattctttctccattctttctcacctcctataacattatgatttgcacgatggtatacacagatacaatgacaattcccatcaaaaagaatacaaatctcttttgaaaatacgcaaatagcattaacgtatttttcatatcaagcataggcccaaacacaagaaatgcgagaagtgcctttatcgagaaaacatgtccaaaagacgcagctataaaagcatcggctgcagagcaaattgataaaacataaccaaaccccatcataataatgggagcaattacttcgttatgtgctactgcatccagtacattccgatcaaaaaacgtttgaaatacacttgctaaaaaagcaccaatcaataaatacttaccagtatcaaaaaactcatctacagtgtgattcataacatctttccaactcttttttttgcttatttgaactgaaacctctacgtcttttaaaacatttctttcgcgatagcaataatacacaattagacctatgaatagagcaactagaattgttatcccaaagcgtgcatatacaacgtaatcattttttggaaacgcatatacagtagataaaagaacaactggattcataatgggtgcactcaataaaataacaatgcctacatgaagtggtagccccttttgaatgagccttcttacaattggtataatgacacattcacacattggaaaaagaactcccacaaatactgctggaatcattgcaacaattggagatttcggcattactttttgaatcatatcttccgtcacaaacacttgaatacatgaagaaacaattacccctaataaaataaaaggtattgcttcaaaaatgatacttaaaaataccgtattcacattcagccattcctgcggtatatttgtgtgcaaatttactagacttgtaaaatctacaaaaaataataaaaagagaaacatagcgataagagctatgcctactaattcttttgaaactctattaaagaccaagcttctcgcctccattttatttacatgtaaacatgtgcttgtccaaatgcttcatactacagcacaaattttatagtctatttctattcttaaatcgtaatcattatgatttattattgatttttcttttcttatcgtttaatataaaacgtaatcattacgatttaaaggagagatcatttcatgaaaaaagtacctatcactgtattaagtggttttttaggatctggaaaaactaccttactacatcacattttgactaataagaataacttaaaagtagctgttatcgttaatgatatgagcgaagtaaacattgatgcatctcttataaaaaagggtggtttttcacgtacggaggaaaaactagtagagattcacaatggctgtatttgttgtacactacgagaagatttaatgatagaagtgaatcgtcttgtggaaaatggtgatattgactatattattattgaatcttctggtataagtgagcctattccagttgctcaaacgtttacttatacagacgaagtccttaacattgatttaacgaaaaattgtcgcctcgatacgatggttacagttgtagatgcaaatagattttgggatgattttgcagatggagaaagtttattagaccgaaaacaagcaatcgatgagaatgatacccgagaagttattgatttattaatagatcaaattgaatttgcaaacgtaattattcttaataagatagatttgctagaaaaagaagatgtgatagagcttcatcatttactaaaaaaattaaatcctaatgcaaaagttcttgaatcttcgtttagcaaagtaccattacaagaaattttaaacacaaatctatttaattatgaagaagccagtcaatcggccggctggatacaagaattaaatagtgaccatcatacaccggaaacggaagaatacggtatcaattcctttgtttaccgccgcaaatatcctttccatcccgagcgccttatgaattggctagaaagatggcctttagatgttgtaagagcgaaaggattcttctggctggcatctcgtaataatatgatagggcttctatctcaagcaggttcctctattacaattcaaggagccggtgagtggatagcggcattacctgaaactgaaagaaatcaaatgattacagaagaaccagaagtattgaaaaactgggataaacaatatggagatcgaataaccgaactcgtatttattggaattgatatgaaccgttcgttaattgaacaatcattagatgattgtctattaacagaaaaagaaatgcaacaaaactggaatacatttattgatcctatcccggcttttacttatacttcataacaattaataaaaggcttcagtagaatgaagcctttttactttatagtactcttatttaataagtttgctttaattatgaatacaattgtacctaaaacaattaatatagcatatacgataccaactaaattacctatttcttccaatccaagcggtaatattatagtagcaactccaactatataagaaaatgctcctgaaagcttcgctaatttatttttatctccaacaaacgtttcttcttgatatcctgctaacaaaaacaacctctttttcacatgtatttgataccctaaaaaaatgataagtaaccctacaaataaacaaactaaaaatccagctaacatatactccccctcctctacaatattttactatacataaaaaacaaattagaaatttcagtttattaatgagtcattctgtgatatattgcatattgtattcaatttgtatttttagaaaggagaattttagatcatatggattcaaatcgattaaaaggaattataatggtcataatcggtgcttgtttatggggcttgtctggtacagctgcacaacaactttttcaatatgacaatgtttcaaccgaatggttagttacgatccgtttacttatatctggaattattttgctcattatttcctcattcggaacgagaaaaaaagagatatttagcatttggaaacaaaaatctgatgctattaaaatgattttgtttggtctattcggtatgcttgctgtacagtatacgtatttcgcttcaattaaagaaggaaatgctgccgtcgcaacattattacaatatttagctcctatattcatcactgtatacttacttttcaaatggaacgttcgtctatcaaaaattgatttcatttcaattaccctttcattagtaggcacttttctcttactaacaaacgggtctgttcataacttggctgtttctacaccagctattatttgggggattttatctggattatctctcgctttttatagtttatattcaaaggaattgttagaaaaatggtcttcttccgttatcgttggatggggcatgattattgggggtattggtgtaacgattgtacactttatttctacaaacgaattcattttattatcaactatgaaatatgtaaaactaagtaccctaccgctcatcacatttgtcgtcattttcgggacacttattgccttttatttatacttagacagcatacgatacctgactccgaaagaaacaacattatttggttgcacagagccactcgcagctattatttcttctgtacttatattacacgtgccatttcaatcttttcagttattaggcgctttttgtgtcattgtaatggtgctcatcttaagccaaaagccggatgaagggaaacaaaaattaaagcttgttcatgcaaaaaaggaaaatatacaatgaaaggattgaattcactatgcctgtccctcaaaattataaaaaaccaggaagagtttcagcaaaatcactcgttttaaatcaactacaaaattggattattgaaggtgtactgaagcccaatgaaaaaattaataatggggaattggctgaggcactaggagtaagcagaacacctgtaagagaagcacttcaaatattagagctttctggattagtggaaatggtaccagggcaaaaaacgaaaattgctcctattaagttagacgacgtatctatcatttatgaaacgatggctggtcttcactctattataggaaagcaagctcttcaaaacattacaaacgctgatattcaactactttctgaaataaatgagcattttcagcaatctatagagaaaaaaaacgcaaaacaagctttagaattagatatacaattccacaatacaatttcttctattgctaaaaaccaatatattgaaccctttctagaaaatatgcaacttcacgttttacgtcttgaatatttgtttttccaaaactttgttccagcaagtcaatctattgaagaacatcactctatcattcaagcattacagaagcaggacgaaaaacaaatggaacaaataatgacccaaaactggctccgtcccatgaaagaaatacaaaaaataatttctacgaaataaaaagagagctggttacacaaaatcgtaaccagctctctttttactaatctatatagctacgcctgaatattcgcataatcttccatatcttcgtactctttttccaattcctctaaagacagctcgtataattgtcggtcgcgaatcttaaacacacctgctccaattaactcatcaattaaatgcctcttacgattttcaacagcaaaacggagttgactactcatcttttaaaaaactcctttctacgatcattgaaaatgataatctctatcaattaccacttttgattataaaagatgactctttataagtaaagtaatttcatgaaatatttaccttgcaaagtacttgtggccacattatatatatgtatgccgtgcgaaaaatgttatgacactttttcttatcctttttctttcatactttgcaagttgtctcatcatgattaaattcaccatctatttctacttgaatggtgacatgttctacatgaaatttctcctttaatacatacgtagcctcttttaatacactttgcgtttcattccctttaataataagatgacatgttaatacttgaaaatctgatgtgacagaccatatgtgcaaatcatgaacttctttgacaatcggaatatttaataacgtactttttacctcttcaacatttatgtgctgtggtgcaccttccattaatatatgaaccgtatcacgtgttacacgccatccactaataatgactaaaatagacacaagaatactagcaatcgcatctgcagcagtccatccgaaaaatttaataagtaacgcagcaataatcgctccgacggaacccaatagatcgcctagtacgtgcaggaaagcacttcttaaattcaaattacctttcacatctccgcctctcattaatatccaagctgataaaatattaataagcagaccaaggactgcaataatgagcatcccattactagcaatctcaactggttctttaaaacgacggattgcttcaataaaaatgtataccgaaatgacaataagaacgacaccgttacataatgctgctaacatttcgactcgcttatacccgtatgttttcgcagttgttgctgttttttctccgagtttaaacgcaagtaaacttaaagctaaagatactgcatcacttagcatatgccccgcgtcagatagtagtgctaagctatttgttacaaatccaccaacaacttctgcaatcataaaacttgttgttagtaggaaggcaattagtaacgcctttttattttttgaatgaccatgatcatgcgaatgtcccatacttatactcctttaagtacaatatctgtatgttagtatgaaacaaactccccatctttatcccgaattgactgattgtaaacgcccgcttcctctgtatacacacttcgctattttttaaacaatccctttttctcaaataaaacaagactacttcttttttattttcatattgtttactaatgaaagaatttttaaggaggttacttaaatgaaacgtttatttctctgtatggaacgtgaacttgttgtagtgaaagaacacaatgataactatgaaacgacttatcacttacaaaatatgcaacctacctgtatcgctgttgatccatttcaaaagaatcgtgtatattgcggaacatttggacgaggtctatggttaagtgacgatagtggggattcatggagaccaattggagattcttatcgttactttgatttccctaaagaagatggtattttgcactcctctatcacttccataacaataagctcaaatgaacaagttaacggatatggtgtcgtttatgtcggcacagaaccgagcgctttatttcgctctgaaaatggtggtgaaacgtggactgaacttaaaaatatgaaatcattattatcttcttatacgtgggcatttccgcctagaccttttacccatcacgtacgctggattacagttgacccaaataaccctaatacaatacacgtttcaatcgaagctggtgctgttattcaaagtaacgataaagggcatacatggattgataaaaaattcggtgctcctatcgatgctcatcaattacttatgcaccctaaagcaccaaatcgcctttatgcatcatgtggtgacggatttatgggcggacctgatcgtgcttatcttgagagttataacaatggaaacagttggatctcatgtagtgcaggacttgaacatcattatttatacagcatggctatcgatccagctgattgtgatacgattctcgtttctgctgcgccaagtgctgatctcgctcatcatcgtatcccttatgaatcttatatttatcgaaaaacgaaagatactccgttccagcaagtacaacaaggactaccatctgcaatcggtacagtcatttcgatgtttgcgacaaacgaagccgaaccacatacgttctacacgttaaataacaatggcgtctttcaatccaatgatagcggcgaatcgtgggaacaactaaacattccgtggaaagatgagtataaaacgcagcatccgcatgcactattcgtcactagttcttaacgaaaaaagactgcctaaatgattttagacagtctctcttttatttctttaaatcaatgacaatatcatctaacacaatatctttgctcttcgcttcttttttcggcacttctattttcttctctttcccattcacatactctactccaccatgattttcaggtgtatgtactcgcaagtgcacgcgaggtgtaacgataagctttgttgcattttcgtttagtttttggaaggtggcactccaatggatattgtaaggatcgttgccacttcccccatttccttcacccgaataaatattccctaaatcatccttaaccgtcaattcaacatctacactatcccattctttcctcgcgcccttagaaacctcttgattgtaataaagaataaatgaaactggcgatattgcgaccttttccatatttgcttttataccttctttttccgaactcccaccaattgttctctctttactatccactgattttacagttaacgcgaaattccaattaccttgtattgattttttcctatctggcatctctattctctctatattccatctaaagtttactttgtcctttttattgctatcatgatgcgtcgttgttaccatacctacatactttttttcagtaactttagtcattttaccactgcctgaactaccatgagcgtccattatatccaatccacctaatatgataggatcctcccctaagtcctgctcactttccagtgaatacgttatagataatgttctgccatcagaaattacatcattaattgtaaccttaaccccattactctcttttgtcatattcaactcagtcgaaaattccttataattttcatataaccccgttctaccattatctaaaaatcggaatatgtcacctacaattggcaatcctccagcatatgtaggaaaaccgataccaagagttgcaaccgataatcctactaaaatagatgcagcagcgacacccttcttcctacttgtcatctttttcttcgtacgtatcgattgttttacatttcgttttactttttccttttcaatttcagaagcctcaatttcttctagttctttttcatctatatcaatatcatttaatagttcataaatgtctttcatattgcactacctccaaaactaatattcgtagcattttgttgtagtttctttttcccccggtacactcgattatcaattgctgcccgagttaatcctaacttgtcacctatttcctctgtcttcataccaagtaaatatttcataatgaacaccttttgatctagcggttctaattgattaatgagcttcaataattcttccctatcttccataacgattaattcgtcttctgctgatttttctgtactgatatgaaactcatctgaaatgatttctactgttttagtcgatttccggtaataatcaattgctttaaacttcgcaatcgctgcaatccactttttaaaatcactcggctctccatggaatttatttgcgttattccaaatggaaagaaatatatcgtttatacattcctctatgagtccatcattttgaatgggaagtagaactttatgcgtgatcccctttatgagtggtaagtatgtatcgacaacgaattctaacgcgtcttctttttgccgctgtaatctttttataaaatttttctcatttgatttcatgtagcgattccccttattgttttgtaaaagcttttacaccctatataacgtctgagaaaattttttctctcatcttttttattttttgtatgtaatggaatactttcccttagccattttctcacataactatgcattcaaagaaaactttctcaagtctgtaatttaattcatgtagtacactatttatatagtcactctttaatttagtgtacattttatttcattaatctattttaaaaattaggagatgagatgtgtatgtgtggaattacaggttgggtagattggaaagaagacctttcaaatcaacatgttattttaaaaaagatggcaaatagtattgagcatcgtggtccggatgctgaaggattttggttttcacctcatgcggcctttgcacaccggcgtttaattgtaattgatccagaaggcgggacacagcctaagacatttcgtgctggtgattatacgtatgctcttacttataatggagaaatttataatttccgtgaactgagagagcagcttcaaaaatgtgggcatgcatttgaaacccattcagatacagaagtattactacatgcttatttagaatggaaagaagactgcgtacgacatttaaacggaattttcgcttttgccttatgggatgatcagaagcaacaattgtttttagcacgagatcatttaggtgtaaaaccactcttttttacagaaagaaatggcagtattattttcggctctgaaattaaagcattattagcgcatccatctgtccctgctgaaattgatgcgaatggaataaatgaaatatttggattaggcttatttcgcactccaggatgtggcgtctttaaacatattcaagaagtacgtgctggacattctataacatttacacgtcataaaaaagtagttactaagtattggaatttagaaagtaagttccatacagactctatagaagatacatcttcgcatattttatctattttacaagatacagtaaaaagacaattaattgccgatgttcctctcgtttgtatgttatcaggcggattagactctagcggtattactgcacttgcgggtaaagaatttgctgctgaaaataaaacacttcatacgtattctgttgactttgtaaatagcgcaaaagatttcgaactgacatttgctcgcactggtttagacactccttgggtaaaacgcgtttctgaacatgtcgggacagcgcatcatgatattattgtgaatgctgaagaattagcaaatcacttattcgttccccttcatgcaaaagatttaccgagtgctggtgaaatggaaacttcactatatttactattttgcgaaatgaaaaaagatgcgaccgtagctttatccggcgaatcggctgatgaagtattcggtggatatccttggtttcatcaagaagaactactatatgtagataagtttccttggctaacaaattggaaaaatacatctcctcttctactaaatgaagtaagtaaccaatgtaatctagaagactatattgatacacgattccaagaagcgatacttgaagtacctactcttgaaggcgaaagtaaaaaatccgcgaaacaacgtcaaatgttttatttatttttaacaagattccttcctttcttacttgaccgtaaagatcgtatgagtatggctgttggatttgaagttcgtgtaccgttttgcgattatagattagttgaatatttatggaatgttcctttcaacataaaaagtattgataatattgaaaaaggcattttacgtagagcactacaaccagctttacctgacgatgtacgcaatagaagaaaaagcgcttatccaacttcacaagatccacactacttacaaacaatccgtaatttaacacttgatatgtgtaacaataaaaacaatcctattttctcacttattaaccattccatcttactttcaattgctgatcaaagtaataaagtgattaacaattttgaagcaagaagtgccatggagtatatgctacaagtaaatgaatggttgaaaacatatcacatccatattgcttaacaaaaaggagttcaaggataaaaaccttgaactccttttatattaattagcacattgtttattatcagtatcaatagaccatccaataatcgtggcacagtctctacctttccactgtagtacatttgttaatacgggctcaatctgcaagcgagttccgtcgtgtaatatttctactaaagattgatcatcatcaaaccttcgtttgtcacactctaaaataccgtccgttgccattacaatgtgattcattcctttttctaatcctcttacacctgacgtaaagcaaggtgtatttgctgcaaaaatatttttcctgccaatatattcgtaatttttccgtttatttaatcgtccttttccatttttcgttttctcagaatggaataaatacgcgaaacaatcaccaactgataaccaatataaaaattcgccttttcgtaaacaaattaagcaagcgagttcctcatcatcttgatcacactttttaataaataactcatctgtaaataacgctaataagtacatatgtgtatgatgaaaagctaaatgtattggataggaaaataactcttttaatttctcttttctttctgaaatcgcttctattatataatcaatattttttgttttgtggtgtgtatcaaaaatcataacaaattcaaattgtaattcagggtcccaccaagcaagtaccgcatctcctcgttcatatgcatcactttcttgatttcccccatatacgccgactgaaagaggaccacatttttcaacatgtatttcatctacatacatctgttcatgactcatccatttgaatgtattcacaactatcatcctctctcttgctaaatgtatacctttacacatagattaccttatatttcaataaaaataaactttttcaacattttttatccaaataaaaggattttatttctaaaacaacgaatatatcttactatacgatataaaaaaggggatttattattatgaacaacattaatcaacattgggagagcatttattatcacttacgatacgaatacgaggacaatctttcccaccaagcaattcgtattttacaaatcgtttctcgtgagaaagatataacaattggaaaagtcgctactgagcttagcctttctcataacacagcatctgaacatataaagcgccttattcaaaagggtttcatcgttaaagagagaaataaaaaagatgaaagagtggtaaaccttacattaacaattgaaggaattgaagtattagaaaaacatactttactagataaagaaaagataaaaatattagaatcacagttatcaaaagaagaactacaattaattgaaaaagcattttcgttattagcgaaggaggcaaaatatgcatttcctcgttaaagtaatcgtttcggcacttattatcggcgttatcactgaagtcgccaaacattatagtacgataggtggctttattgctgctcttcctctcgtaagtttacttagtctattttggatttcatttgaaggcgggaataaacaagaattgagtcaatttgctttaggggtattatatggattccccgcatcagcactactattatttattgtctatattggtttaaaaaattcatttacacttagtacatctgtcctactcggtataggtgtttggtgtatcgtttttgcttttcaaaaattatttcaagcttagggggaattaacattcataaatttgtagaaataatggggcaaaatatagaagtacatataaaagaccaactatgagaagtcaaggggagttttttatataaatagggggtgttttataccctagaggctgcctaatgaaacgacctgtctaactttcgggggtcacttcataaatgccacgactttttatattaattcgtactaatgcctctcgctgcccaaatgcgatcgatatcagcagcatgttgtccgccatataaaagagcatccgcttgcttaatcgctttcgctccatcactgaatttagagtttggtgttaatgaccagtgtgattgtaaaatgatttttgttgctacatcacggccaaaagcttgtgccatttcgtattggccttgagcccaaatttcaccatcatcatgcacttcattcgttatatctttcggatatactttattcgtatctaatcggcgtaagcatgttggatctgaactagaataagctgtcgcatcccattctccaacacatgctttaccatatccagtagtcgatactgcatcttcatatgtagcacctaagaagtcgccaaatccttctcccatcgctccaccttctgctgaactaccaaagccaggaacttggttatcttgaatcgaatgcccatactcatgtgcgataataccagcatcttctgcatcatcaacaccgccagtaccgaaagttaaagcttttgttgatggagaatagaatgagttatcatcagttgtaccattaacattcacttttatcgaacggttattaatatttttaaaacctagactttgaatgtaacgttgcaatgtgtcgatatgatagtacgacataacatcttcaaagctatcatttgcgcgtgtatagttaaattgtaaattcgtagattttgttttcgcttttgaagaaatcgttacatattctccaattaaaaatcctgttccatctaaaccttttaacgtaacagttttcagttggttcgttagagctgttgaatctgcatcgttattatcttttaagcctactttactaccgctagatacgactgggttaggtaaaaatacttttcctgacccttcagcttttcggtttatatcaacctttttaattaactttccattttctgcatcaataaatgtttcccatgcaccaaatggattattagaatggactacaactttatatactggacgagcaattccttcttcaacaatatatccgaactctttatctgtaggagcccataaattttgctcacttgcttctccaacatacgccattgatttttgtattgcatctttttcactaatttttgtcgttacttccttcacacctgtaacaggctgataatcagaaacagcgagtactccctttccctctccgttaagcgtaactgttatttgttttgaaaatacaggtgcaccattaacaacttgttggaacctaacatatgaagctactgatgtttctgttgtagaaatatattgcaagtctgaaagatctgttttcaatccatactgcgcagcattttcttttaaatattcagttgcttttttctgtggcgaataagcttctaactttacttgctgttgtttttccaatgccgaaaccgtagaaatcgtccccattactaacggcacggtcattgccattgccaccatttttttattaaacatagaaccactccccctaataaagtagctcaaccttatcccattaccactaggcaatcattccccgcaaaacggatggataaaaattgaatctacgagtaattctctatgaacacttctattacctttccatttagggtaagtgaaattttctcaatatttatgtgtaaagtgaacacaatactttagaaagaaatttctaaatccattccttatccctaaagcttttcatattactgtttaaaaaaatagactattttttacctaacggtaggttgaaaaaatcacttgtaagtgatacgatttaaataacctttttttaggaggatctatatgagtaaaagtgaagaaacactctcttcaataatggaagcaagttatcgcctttttgctacgtacggtattgttaaaacaacttatacgatgattggtgaggaggttggtatcgcaaaaccatctatatattactactttaagtctaaagatgctttaattgaatgtatttttactgaattatgtaaagctatgcagttctcttcttatttccatacagaagagtttacaaaatcaaattttattgaaaaatgtattgcaattggccttaaaataattgatgaacagcgaaacgacccttattttaaccgagtgttacaagaatatgtattactatcttcaagaaacaagatgtacaaagatcgattactaactgtgcaaacagaatacttacatggatttgaagtactccttataaaagcaaatgaacttcaattaattgaaaataaaaatctagtttcaaaagctcatatgttagcattagtgcttgataatatcggaaattttatgatgattgatgcaaagatagattataaacaaatttggattgaagctgtaaataacatttttgaaagaaggggttgaagtgaatacaaaaaaacgcattatcggcttagattttgctagagcttgggcgatgtttggtatgctacttgttaatttcatggtgataacaggtgcagaaggaaatggtcccccttttttaataaccttcatgtcactatttgaaggtagagcctctgctttgtttgttatacttgctggcatcggtataactttaatgactaggtcagccgttgctagcaatgaacaaataaaaatttctaatagccgaaagaccatatggaaacgatcacttttcttatttattttaggattactactatatgtaatggagtggactggggatatattacactactatggtgtttaccttttcgttgctgcattactcatgacagtacgcaaaaaactattactttttctttctatcattattttattgttcgcacaatctcttcagcttactttcaatactttcgagggttgggtaggtccaactccatttataaattatgtagacttctggacaataaagggttttcttcgcaacttattctttaatggctatcaccctattttcccttggttctcgttcttcttaatcggtatgttaattggcaggttagatcttcataataaaaaaataaaaaaaagattactcttactcggtattacaatcacaatattgacagaacttttatcaaaaggacttacacacttttttattccatacatcggcagagagaccgccacatttttatttaatacaggacccatcttaccaaatgtattatatattttatctgctacaggatcctctattgctatattaatcatttgcctctatatcgctgaaaaatatagaaataattggtttgtcacttccattgtgcaaacaggacaattaacattaactcattatgtcagtcatgtatttatcggtattgggacattaattctattaaatagaatggaaaatcaatcactactattcgttttattatttgctactgcatttttcattttcagcattttaattagtgtgttatggagaaagaaattttctagaggtcctatcgaatggattatgaggaaattagccggataaatttccatcatacaaaaaggaagttggaattattccaacttccttttcctttaatgagccgcgcttaatttaattcgaactttcgtttcacctaaagaaagttcatcgtcttcgttcgttaagtgaccaaatgtaaattgtttaacgagtaagttttcttccaataaatctttatggttcgttaacgttcgctgtagctctacttctgtatcaagaataacatcgactcgtaaattaactggtaaattcaactgtttacgatattcttgaaccgcacgaatgaattcacgcgctactccttcttgcaacaattcttccgttacattcgtatctaacataactgtatattgtccgttagtcgtattagagaatcctgattttgcaactttctcaactaacacatcttcagcagttacaactacttcttctcctggtgttgcttcgtaaactgctcttcctgttgatacaaagttttgtacttcttcttgtgataattgttttagccaaccattcactgcattcacatttttaccgaatttcggccccgctgttttaaaattaagcttcaattgatatgatgtgtattttgtttcatcgagttcaacatggaatgcttttacatttaactcatccataacgatatcacgataagattcccaatccatatcattctcgttatgctcaagtaatacaagttctgctagcggctgttttacttttaaagaatgctgattacggttacttcttccaagttcaacaacttgtaaaacagcatccatttccgcttctaatttcggttgaagtagtgattcatttacaactggataatcagctaaatgaacgctgcttccttctaaatttagatgaatgtcttccgcgacaaacggtgtaaatggtgcaattaatttactaattgttacaagcacttcatgaagtgtctcatacgcagctgctttctcagcgttcataccagattcccagaaacgattacgtgagcgtcttacataccagttactcacttcatctacaagtgctgcaatttcacgagctgcattcgtaaattgataatcatcaagtgcagttctcacttttttcgttgtactatgcaatcttgataatacccattcgtctaatttcgtaagctttacatcatacgtttctttcggattatactcatctaaatttgcatataaaacgtagaagctatacacattgactaatgtatctacaaatttagatttcgcttccagtactgttctttcagaaaaacgcttcgcattccacggggcactatcaacaagtaaagcccatcttagcgcatctgcaccaaatttatctactaaatcaactggatctagtgcatttcctttgcttttagacattttctgcccttcttcatctaaaacatgccctagtgataacactcgtttatacggtacttttcctgtatatagtgctgatactgctaataaactataaaaccagccgcgtgtttgatcaattccttctgcaataacatccgctggaaactgctcttcaaataactctttattttcaaatgggtaatgatattgtgcaaatggcatagaaccactatcaaaccaaacatcaatcacttctggtgtacgattcattgtgcctccgcatttcccgcagcacacttgtacttcatctacatacggcttatgcaattccaaatcttctggtgtttctttcgtactatactttcttaattcggcaatgctcttcggtgcgaactgatgattgcaactttcacattcccacacgtttaatggtgttccccaatatctatttcggctaatattccaatccaccatattttctaaaaacttaccaaaacgtccatgtttcatatgatccggataccaagtaacagaatcattattttgtaaaaatgtatctttaattgcagttgttcggattaaccaactttctcctgcataataaagtagtggtgaatcacaacgccagcaatgcggatagctatgttcatatttttctttatgatacagtaaaccttccttcgctaaataacgaacgatatccacgtcacaatcttttacaaatttccctttcaaaaatggtactgcttctgtatactcacctttttcatctacaacgtgcaaaaatgacaatccttcactttgaacaactctataatcgtcctctccatatgctggagcaatatgaacaagtcctgtaccactatctcccgttacaaaatctgctgcaataacgcggtaaccatttgtaacttctttcatcggaaatggcgctgtataagatgtgtttaataattcttcgcctttatgaacagataatacttcatagttctcttttaatacttcttgtacacgttctttcgcaacaatgtatacatgactttcttgttttgctttaacgtattccatatttggatggacagcaagcgcaacgtttgctggaagtgtccaaggtgttgtggtccaacctaaaaaatactcattttcactatctttcactttaaacttcacagttgcacttaaatcttttactgttttatacccttgtgcaacctcatgtgagctcaatgaggtttggcagcttgggcagtatggtgaaactctatgtcctttatataacaatcccttttcatggattgtccccaaaatattccatacactttcgatatatggattccttaaagttacatatggatcatccatatctacccaataaccgatgctttcagtgaattcacgccactgcttttcatatgtgaaaacactctctttacacttttgaataaatggttcaatgccatattcttcgatctcatgtttaccagaaataccaagttgcttctcaacacctagttctacaggtaaaccgtgtgtatcccatcctgcttttcttactactttataaccagccatcgttttatatcttgctactaaatctttaattgcccgaccaagtgcatggccgacgtgtggtaaaccgttcgccgttggtggtccttcataaaacacaaacgattgcgcgccttctcgattctgaattgattgttcaaaaatgctttgttcgttccactgcttacgaatacgtgtttctctccctacagctgactcttttacatctactttcttcatctacaatcactcctttgaatgttttaaaagcacacaaaaaacccgcccctatgaagtagggacgggtttacccgcgttactaccctaattctattagctttttcactaatagcgcttagcaacgtactatcatacgtgttctttgtaacggtagacatccgtccgggcttactcactttcagcctcgtctcctcggagatgattttcaaataacttctgcccaccggctttcagcaatataccggctctctggagaacagttcactattttactctttctcgtcttcagatttgtatactttgttaaaagttattttatgccatttagcaactaattgtcaactaattcaaaatatattcttatccttatctcctattcttatacaattacttttcaaattctcgcaatgctgctaaattttcatcatcctcaataagttcaacaaagaatcccgagtcatcctcacgaaggacaatttcaagctcttccttcgcctcttcatttctatttaactgtgctaaataacaagcacgatcatatcttgctaacaaatcacttgcatccattgttaatacttcatttgttattttttctgcctttagtgtttggccggcaccatgatatgaagacgctaaagaaagaagaattactgtttcatttggatgatgtatagaagcattttctaatacttgaattgcctcttcaaacctttcttgactttgatatatttctcctaaagcaagaaatgctctgcttacaaacggtgtttgctctgttaattgtaagataatcttttctgcttttctttcttcccctgctttaaagaatacttgtgcttgcagaagaagagtatcataatcatctggtagttctcgaaccatttgcttcgttaattccaaagcatctcttaacatatcttcttcctcgcactcaacgaaaagatttacaagttgcttcgctacttcataatcccatttattttctagtgacgtgtgcagaatctctattgcttctttattcatctctacattctcataaaatagcgcaaatcgctgtgctgccatactatttttcggatttaactttaaagagatttcatataaatcaattatcatagtaaccattgaaatttctttcgcacgatttttcatacgataaaaagctctcgtaatgatagatcgtttcggctgttcatgcagctggcgttcaatccatatttccgtaaccgcagctgcagcatacatgaatgctgtacttctttctgcttttttcacctttaacgtatgaagaaaatctcgtatgttagacaattttttatgttgctctactgcttttacataaacatcaaatatacgttcattatcaaaatctttttgtattactttcattgcaacttcaattgcttttacatttctttttttcactaatacttttgcataatgatatagaacttctatatgctcaccatctaattgtagcgcgtattcaatctgtgcttgttctttatctatttcattcatcgctccgtacacatatgcaatcgcatctaaacgccatatttcaggtacttcgtctgctaattgctctagttcagtcagcaattcttcctgaagattcatatctactgaaagctgtgctaaatattccatattaatatgcaacggctcttctttcatcgcctgaaccatatgactttgttctttagaacggttttcttctttttcgtatatttccgcaagctgtaaatgtacacctacgaaattcccatcaagctctaaacatgtttcatacgcttgttttgcttccgtcaattgccctaatgccataagtgtttcaccaattcggtaatacggtaatgccgtttccatttgttctatcgccttattatatcttttcatcgcttggccgtactgtccaatagattcatataaaatacctgcataacaaccgtactcacttacttcatttctttctttgtgtaacgttcttaaaaatgctatacctcgttgtacaaattccgttcctttaattcgattcacatattcatctaacgcacttgctacattataatcccttttctttataccattttctaacttagatagtgctactttaaacccttcttcatttccaccaagttcaatttcagcatcccataaaaccattcctgcattcatgaggaaatcttgactcttttcaatttgcttctcaagaccaagaatatattcttttgcttccttatattgttctcttgccatataaacttgtgtaagtccgaagtgagaataaacatcctcatcattttcttctaaagcacgcttatacaatacttctgcttcttccaagctatcattttgaaaatgataatcacctaattttacgtaaagaggtgctttatcatcacaattctcaataccgtttaataaaatttctttcgcactttcctcatccttcaaatcagattcgtatatttccgaaagtttcgtataaatgtaaggtgcattactatccaaatgaatcgctactttaagcccttttattgctaaatataatttccctagttgatgtgcacatctcgctcgttcataccatacatgcgcttcatatttgtactcttttaacaagtcattaaagatttcatatgcttcttcatatctttctaaatctattaatattaaaccgtgatttgttaaagtgaacctttcaggactacgctctaacgcaacttgagagtattgcaatgctttttcagattgatcaatatacatataggataaagctagaaaactccaagcaataggctgatctgcgtctaattgtaacgataaacgaaagcttgaaatcgcttctagataactttcctgttcaaacgcatatcttccgtttattaaatgatataaagcacgattatttttcttctcaacgcttgtcagcatttgctccgctttctctacttcctgaagacgaataaaacactgtgcaccatgcaatttaacaaagtccgagttcggaaacttttccattaacttatcgatacaatataaaataaattctttatctacttcaacatctaagtgctttatcgtatataaccacgtatttggattatcactcgtttcttttaaaaattgtactaggttactaattccctctttgtcatgttcatctaaatgatcagtaagagaaaaaatagatttaaaataacgattttcttcttcacttagaaactctagttgctccttcttttctttcggaacaaacgtgattgctaaacagcctgtataacgatatttttcttgtactttactatattccacaagaactggctctataaagtttggatcttgaacatagaaagcttgcaatgtatcatcatatccagatagaacttgtacgtgtgaagcatgctcaatatctatacttaataaaacaggaattccttcgtcaatcagtctcttataattctcttcattccctttaaaataacgatattcataacctaattcttctaaataagaaacagtatctgaaaacttcgaacctgtcatatcaaaaataaactctgctatttcatcttgtgtacgtttctctccccatatacgcaacgtcatctctaaacttgtcggaacacaataattatccttttgtacaataggaactatcggcaagtgaaccttttttccatccggatttttttctaaattatgatataaagattcttttaaactcttttcttcttttaatagtttttgtaaatctgcaaatttattcattttgtacagcgcttctgcacgtaaatgtacaaagtaagtattataggcatgatatggcagctgagtatttatattatctattaccgctaacatctcttcatattgctctaaatctaataaatactttatcttctcaaaatgaaaatatggtacttgtgggaattttacaatcgcatcattgattaactgtatcgcgcgtttttgttctcctttattcgcatacaattgtgataataaataggtagataactcttcacaatcttcatgctgcatgccagcaataaattgttcttccgctttctcccattcacctgtatgcatataaacgtagccccatttatcaaacactgcgcgcgcactgtactcctctgctttttgcatatacattaacgcttcttcgtttcgtttcatttctaaaagacatcgtactaacgtaaaatatgttttcgctaaaaaatctgcatctatttcttctttacttaactcttctaaagaagattttaacaactgctccgcttcaagaattttccgctcatcaattaactcatcacaatataaagagagcgttctcatatttgggaattttttataagcgtaacgaatgaggaatgaactgtattggtgcataagcccttcatcagtaaggcgaatcaatatatcgaactccttatgcgaaggaatattggcaagccaattcttcacataggataaagtattcgtttcttttatatatgcaatttcattatttatttcctgtaatccatctacaaatctcttgtcttttaaacaagtttctaactgcttaaaatctagcatgcattcacctcgaatttatatttaaactgctacttgcttagattttacacaccatatagtatgtattcaactaaaatctcttataatagatgttattaattaatattattcaaatttataacaaaatatagtaaaaatgattgtttttctccgtattttgtttaattatatggaataacgtaacatgcggttttaatcttgtagaagctgaaattagtacataaaattatatcggcgattttcaaattatatcgaccgattcttaacatatatcagcgattatatgtcgaatatcgacttatcgacattaaacgacaagccttatacatcataccttttaacaaactatgtcaccaaatgtaattttcatattgggagcgtatacaaaagaagaatacacatgaaatattttaaaaaatcgtagttcagcttcatattgagctagcgcattatcatatgttaatcctctggctattaaacgttctacaaattgttgcttatcacccggatcacctgcaatcccctcttcttttaatgattgatacaaatcgtttttatcattgtgatgcatatttgaatctaaaaagttcactttatcgcttactctacattcaatatttttcacacctaattcacttaaatatatcggtattttcatgcctatattgccatctttaccatttctttgcgtatcactttcaaataatttctgcaaaacacctagctgaataaattccgattgtttctccccatctagtaaataagaagccatattagaaatccaatgtggttcaaaacagattatttttccgcctccttttatatacaaaactaaagttctctatataatagccgtattcctacacttttcttaaaatttcaaagcaaaaaagctagtgtatttttaataatacactagctttttatttggaagaaaaatttaacaagtacaatcacaatcaaaacaatccgtacagtctaaatcgtcacaatctgcttttctctttcttttgtttcttttaagataataatacagtagcccaaacaatagtatacaaataacaaaagctattattgcttctgtatacttattttgaatcataaaaccaattccacttccgcctgaaataaaaattagaattaaataaatccagaacatctatgtaaatacctccattactatatatcttaagataatatccatataacactagaggaaatgaataatcccataccattaccgcttaatacaccagtagttattcttagcaaatttgagctacttctccatttccacttttgggtgaacccatcgataagtaacggaatttgagcgaaaaatgatagtatgattgccaaaagaaatgaaggtgtcatataaaaataaattggaaacattaaaataccaataagcatgcctgtacaacgcgcacataaaggtatgtacttttgtagtttaaaaaaactcctatctaatcttctatgacaaggaatttgtaaaataaaagttcgaatcaatatgaatcaccctctctaaaaagattttaattgattttgccaaaaaaatatatattcaataaaaaaacaaaccaggtttatactagacccagtttgtcagtttactactatgttacatctcctcaggtgcctccaccccaagtaaacgtaatccttcttttaatacaaccgtcacagcataaaccaatgcgagtctgctgtctttttcttcgctctcttctaatatacgaacattaccgtaatatttattgaatgattgtgctacatctaatatatatttcgaaataatcgatggctcatttttattgaaagctgcttcaattatttgcgggaatttatttagtaattttacgacactccagctatgatcgtcttttaaagcaaatgtacatgtttcaaattctacactttcttttcttaaaatagaacaagcacgtgcatgtgtgtactgtacgtaaggtcctgtttctccttcaaatttcagcatattttctaatgagaattcgatattatgcatacgctcattttttaaatcgtggaagatgactgcaccaacaccgacttgctttgctacttcttctttctgttttaagtttggatttttctcttcaatattttgttttgcaagttcgattgcttcttcgagtacttcttcaagtaaaataactcttcctttacgtgtcgacattttcttaccatcttttaaaatgaagccaaacggtacgtgttccataccatcaacccaagtatagccaagtttttttaatacggtgaaaaattgattgaaatgtaagctttgttctggaccaacaacatatagcgctttatcaaacccataagtgttttgacgatataaagctgccgttaagtcacgcgttgcataaatcgtcgcaccatctgattttctaattaagcaaggcggcattccttcttcttctaaattaacgactaatgcaccttctgattcttcaagcaactcatgttcttctaaaatcccaataaaatcttccattaaattattataaaatgcttctccctgaaaattagtaaattctacgccgagaagttcatagatgcgagaaaattctttaagggactcatgacggaaccaattccaaagctctaccgcttcttcatcaccttcttctaatttcttaaaccaagcacgtccttcttcttctagttcttcgtcgtcttttacctcttcatggaattggacatataacttaaatagctcacgtattggatcttctttaactactgcttcatttccccattttttataagccgtaattaactttccaaactgtgttccccaatctcctatataattaatccctacaacttcatagccacatttttcagcgatatgtttcagcgaatttcctatcattgtagaacgtaaatgccccatcgaaaaaggtttcgcgatattaggagaggaataatcaattactactgttttttcacagccaaagtggttttgaccgaactcttctttctccgctaaaactgtttttaatactgcatcacttacagtttcacgattgaaaaatacatttacataaggaccaacggcttctactttcgtaaaaaacggattatttaatttctcagcaacttcctttgcgataagagctggtgcttttttatattgcttcgctaatgaaaagcatgggaacgctgcatctccaaattcatcttgtttcggtgtttcaattaaatctaaaatttgtttttgcgttaattcattcgtgaaaatattagataaactttccgcaaactgcattttataatccatgatacaacctccttattttttaaaacacaaaaaactcgtctctaaaaaagagacgagttttaacccgtggtaccacccttgttgttcgttacgaaccactttcccgtttataacgaggacagggggcctcggctttctctactattcgttcaagaagcatctccgaagtgcgcttcatctttttcttccgtactaggctcacaccatccctagctcgctttccttctaaaaaagactactctcttcatcacagacagtatatttaattaattattgcttattatacatcttttcaaacaattagcaagggtgaattacaccaaagtgaaacttagcactttttcttttgtatacataaaaattgtgtttttcaaatctagaactacgaaaataatcttttaaaacgacacgttttctcgccactcgttttgcctccgcaattgtttcatcagtaatatcatgatacaaagcgaagtgttttaatcctttaattccgtcggattctatgacagtttcttcaaacatcggatcaaggtaaacgacatcgtaactattgtcttcacattgcgctaaaaatgaaaaatgctccgtttgctttacttgaattctttgcattgcttcatcaatttcagaaacggatgaagaccatgttttcaaaccattttccataatataagccatatactcattgccttcaagtcctgttacttttccgctttcaccaacaacataactagctacaatactatctgatgccatcccgagcgtacaatctaacactgtcattcctctctctaattgcgtggcttgtacaaacggatcgtgttctccacgcattaaccttttcacacgaaacatcgctgagttcggatgaaagaaaaacgattcttccgtacctttcggataaatagctaatcggttcttccctacgacaagcacatcttgttcatactgctcatgcagcttatgtactggtatgtcattacgtttaacgaatgaacgatttaattctgcggctacctgctttgcataatctgtcatttctttattcgttcttcctgctgttgttacgatcattgtttcacctctatataaagaaaagagggagatttactctcccccttctttagcaattcttttcgaaagcttgttctaagttcgtaataatttcgtccatagttgcaccttcaatttcatgacggtgaatgaagtgaacaacttcttttccttttaataatgccatagatggtgaagatggaggaatttctccgaagtattcacgcatttttgcagtagcatctttatcttgacctgcgaatacagttacaagatgatcaggttgtttttcagcacgaacaaccgcttgacctgctgatggacgtgctaaaccagctgcacaaccacaaacagagtttacaactactaaagttgtacctgatgtattttccataaattctgttacagcttcttctgtagttaactcttcaaacccagaacgcactaactcttggcgcattgggattaccatttggcgcatgtattcttcataagcatttgacatcttgtaatctctccttcaactttcattccaaattcatcatatcacgctctattaataggtgcaaaagaaagataacgatgatttcatttttttgtagggatttcacaaaccccaccgcggcaatgccccactggaacaagttttctattgttagcgatataatcgtatactttacttccaaaaccaagtacgatagatagctttataaaaggaactgcaaaccaataagatggaacggcctttgctaatacatctatgctctgaataccgtcataccacttattatttttaaaaatatacagtctttgttccatcttactttgtagttcttgagaaagctcatacttctcaactacatcttcatttcgaaatgaaacaaatttcatcttaccctttttatctaattttttcgtacgttctgcaacagccgtacacatcggacaccaactatcatagaaaacaatcatacattattcccctttacgtgactccgtcatttgtttccatacagaaccttttgcttcttctccgccttcaatacgctctaatgctagacgtgcttgcatcgctacttcaaactctggatcatcttgcgctgcttttaatgctggaatcgcgctttcatctccaagttcaaataagaacatcgctgcacgccagcgtactaatttacttggatctttcagagatttaatcataacgaacatcgctgccggatcacctacatctgataaacaatctcctgcagtacggcgaacacttacagagcgatctaacaacgctttatataataacggtaatacttcatcaccttttaccatacctaaatacgctgttgctaaacggcgtattgaaactttttcatcatctaacgccatcttcaacactggaatatcttcttcagtaggatccatttgttctaatgctgcaaaacggtttttccagtcagaatctttcatcatctcttctgttactttatatggctcacgcttttggatcgttacttcaacagcacctgcttgatttaataattctttaaccgtttcatttacacgttcttctgaataagcagcaacaatctcttctactacttctttcccgatttcttcaaagttaccgtaacgtgtactttgttccacccatttacgctcttttacaacatttggtgcagacatttgcactttcataattgattctttaaaacgatcaggtaaaccaacacgttcttccgtcgttccatctgttaactttacttgcattggaattgtaaagaacatttgaacaaacactttcacttctccaaaatgagcaagttgttgttcttcactttcttccactacttcttcgccgaaaacagcacgaacttgttgtaataaaactttccagtcatacttcgcatttcgctccactgctaaaaagtcggctacatgatatacacctttaatgccttcaattttcaaaatttcttgcacttgcattggtgcttgttctttattttcatttgtataattattacgtgctcctgatggtaatacttcattcaaaataactttcattgtgtttggacttggcgtcggttcaattgctttaatcttcacgtaaaaaactctcctttattgcatgttcttagctgtattgtaacatgttatcactctatactcctactcggatgcttaattttactactttcttcccactaccatactatttcattctttttacattttaaattaggaacgggattttaaaagctttcgtttccgataatttttattttttatccatttcttgaggcatcgccattatttttgaaaaaaacacgctaaacaaaaaaatataataagctatccatatggatagcttatttacataattttcgttattggaagacaactatttttataaatacaaaaggcagaaaagtatatagattctacaaaatattttgattgtgatacatttacagaatctcttattttataattaatgtcttattattttttggagggaattcgatgaaaaagtttgttttgatatttgggccacaagcagttgggaaaatgacagttggacaagaactagcaaagatgactgatttaaaattatttcataaccatatgacaattgatttattggagccattgtatggattctcttcggaaatgtggcgattaacccatcttttccgaaaggaaatatttcaatcattttcaaagagtgaacattatggaatgatttttacatacgtatgggcgtttaatgaaaagaaagattgggatgatgttgaaagtatatgtaatatttttcgttcccaaggggttgatatttattttgttgaattagaagctgatgtagaagaaagacttcaacgaaataaaacacctcatcgacttgaacataagccaacgaaaagaaagattgaacaatctgaacaaaatttattaagcacatttgaaaattttagattaaattcaaaagaaggagaaattacagagaaaaattatataaggatcaataatacgaatttaaatgctacagaagtagctgaaattataaagaaagaatttcaactatagttttttttaacaaattgaacagttcggattttatgaatatcatatacatttctaattaacataacgtcctattatcggttgcaacaaaaagggattccttactctcagaaggaatccctttttttattttctatcactcgattcatctttttatacattcctatcctgtgatgggttttatggttctcgtttgttactggattagccaaaaaacgttctaaaattttgtatactctttacttattttttcaaaaaagctggcggtatcccctctttaagtttattaaaatactttccacaattttttccgaagctattacttaaaatcaccttttattacgatgccccctcccgccttctctccaaaaaggtaatactctcaatcacaacttcagttctatatattctcttgccttgttcatcatcgtaattactagtctgaatacgccctgtaatcccaacgagcgaccccttcttacaatattcagctacattctcagccgatttgcgccaaacgacacaattaataaaatcgacttgttgttcacctaaactatttcgaaatcctctattcaccgcaacacatattcgtgcataagcgacgccttgttttgtgtagtataattctggctcctttgtcaatctaccgattaatacaactcgattcaatctctgtacttaattatgtgtgtaataacttatttttgttagtattaaaacgttctctttatttctacacattgcttttatgtagaaatagattagaaatatataaacctgtctaaattaattactttttaaacataaaaggtaattaatctatattattataaggataaaacatataacaccatccatatacatagatggtgttatatgtttttataaataggtacaaaatgctctagactggagaaaatcattctattctttatttatataattctttacagtatactagtttcttgtaattcaaaatctaaaattttcttaaattcaccttaattgcttacattccaacaattagttctccttcatttgtaactaaaattttcatttcttttagatttatataagcctgtttttctaataatttatatttttctttaggtagaaattttggccctttgataaaactcgcaggacttgcttttaaattttttaacccctttactacttcaggtactatttttaataaataaggagaatctaatggtgctgcatacctatattctaaaatacgatacacagatttctccatctcctcaagacttctagaccatttcccttcacaaatagcatcacaagatgcatatatgacagcataaaacatagcagaaatattatttttcctttgtaaatcaggcaataaagccccttcctttatcgggtctacatgtttggatatttctattaataaatctctgtaatctccggtatatactccggcctcaataaaatcttccattcctgaaatatattcataggtactagatgggaaatatgtttgccccataaaaagtttatttgtactagagaatctctcaattatcttatcccatccctcccagtgaatattgaaaaagtctaaagtggggatgtacgccatagtaccatcatgttcgtatggtactattatagaaatttcagtgtcactagttgtaaaatgatcccatccagtaatccaaacaaccctttcatattcttcatgtttacgctcattaactacacctatatctaaatccttaatttcagataagaccagccttacgtcggttaatatccttatagcctccataattgttatgtgagttcctgggttatgctttgctttattataggatgtccgaagttggtgaagtgtatgtatagacttagaagaaacacctaactcctctaacccatcaattaactcaaagaaattttccctatttcttctacttttgtatactgcttctttaagaaacaattctattgttgatccaatctctttcaaaaaacttttaacgtcatgttctgtatgatgagtactagaaatacctagagcatttgaatatgattcatttacaatatttaccattatttcgatatgtgttctcatactttcactccttaataattcctttatgtatatgctactttattattaaagtctatatttactatacagactacaatctaacaaactatagtacctcgaaactattctatctatacctcttcatgtatttgatgtcactttttcatttacatcaattccccaatacgaagcgtagaagtcattactagaatctgcattaatcataattataaaaatatggttataagctttaaacaaattcagtgtgaacttaatgatgaattaggttttaattatcaggactattcattaagcctttaatttttaaatacaattgtatccataaaacaaaaaaaacgctattctttttgtagaaatttacagaaaggatggcgtttttgtatgaatctttcgattcaggatgagtttcatttatttgctgaggagctacagcgatatctatatccacatattctttaacaactcgcacaggaaacaagttttgtaaaacggaaaagtaagtatggcgcacgagatttggctgctttatgtatctggattaatcaacaggtagcaagcaattctcttactcgattatgtagccaattttatgcaaatgcaaatacagctacatttaagagtccacaaggacttaattaacgtttatattaccaataaatatcccatgggaaattgttccgatggaacaggttcatgctatctactcaatacgttggcaaatagagattgtatttaaaacatggaaatctcttttgggtatcaatcattgtcacaatattaagcaagagcgtctagaatgtcatctttatggacagttaatcgctatttttctttgttcttccactatgttcaaaatgcgacagctgttactacagaaaaaaccaaaagaattaagtgaatataaagcaatttatatgattcaagatcatctgtacttagtatatggagctatacagaaagacacccaagaaatatcaaaaattcccttcatctgtttgacctctacagaaaaacgaaaaaaatcccatagattcgagaaaaagacagtcttctatattttaggtgtcgtttatcagtgtactgtatccaatctaaagcagaaaactgcataatctttaaaaagacatcatatcaaggcttatttggtatgtgtatttttaaaaacaaataaacaaattatcaagcatgtaggcaacaagaacggaatttcatgaaaaactcaccctcagcttgatgggcatgtatggtgaccccttataacaaacagtccatatattactttattttctcttcatagccccttaacatttcataccccgagaacagtaaatcctttaaatattcatcttctaaaaggttatttaacatctctaaattccctatatttttatatacatgtttcaaatctataagggtttcttcacagtacatttggttaattgaattaatataatctttagtaaccgtcttaaattgttcttcaattaaattttgtgatattacaatgctattcatattacccttagacttcttttccaactccctatccaatactttctttaagtaaaaataaaatccagttctgtctctacacatattaattgatttaatcacatttaaactaaaatccgattcatcaaatgcatacagcgatttataaagaatataaatttcctcaatatccaatagaatttcttcacttaataaagattccattctattgcttgttaaaaaataatcttttaatgttgcaggtaactttattttatttatggtgctattcatacttaatttatcatccttctataatattagaatccattctaatattatagactacacgactcgccgtgactatagtctacatgtttaaagattaaaaaatgtacttatgacactatcttaatttatatctttactctgaatcatgactaaaaacatttattcattttcatactaactaatttaatactgacatctatcctataattcttttattagtaaaatatagttttattcttttttgcagactatagtctgtagagttaaagaaatacctcttccaaaattatcttataaatattgggagagtggtttcttgagtattgaacaaacttttggtaatgtcttgcaggagtatcgtcttaattcaaaaatgagccaagaagaattagcgtttaactctggattagacagaacttatatcagtcttttagaaagaggaaaaagaaaaccaacaataaacactttatttgcattagctagagccttaaaagttaatccgtcacagttaattaaagaactagaagaaaaattatcaaatccaaaaatataaaaagaaacaaaagaaaatactttaagtgttttcttttgtttgcctataacatttaaagaataataaaatagtttgatttcagaaggacgaattattaaaataactcctattctacctaaataaacgtagtaagaactatgaaagaatagttaaattaattaaaacaaatctttcattttttcatctttatattcgtctaatactttatactttatttcagttttttcatttatccagcccacgaaccattcttctttccgactacgttcagatatcttttccatatagaaatcccatacaattgctagtttatttaattctaaatactcttctaaataatctgctctaaataacaagtttctttcataccctaaatactgtgcatcaaagacaaccatattttcagtcttgtctttccataccccctcagaaacttgaactagttcaaaaaacttcactaaatcaacatttggtaaaagataactgcatgaagttttttctccagaaacagaatttatatttgcctcccaggaatattcccaaactgaatcttcacactttatattttcaaattcattttcataatacatattcgaaaaagctgggtgccaataatgttcaaatgcaaatatatcatacgtatttttccaggaaacacttatatcttctttattcatagactttaaagcgatgtaattttctttatctttaagcggcaagaaaactgcctttgtctttataaaaaactcatccctatcaatgaagttttttccgttatccctttcttgattaatcaattgtgctaaagatatatatctatgtcccttatactcaataaatatgaaattaccgagacatttaaactcctctctattttgggcccaaattttatttggcttatacggtaaataagattttattaaattacgcgtatttttttctggtgggtgatctaataaactgggatcaatattccttaaagacgactcccatggttcatttatttccttattaacaggatagttatcttttaatttcgctagtatttcatataacgcaatccactggtactttttaccgatacgttctactagattttcgtgcctattatagtatcttagatttttatcataattaccatgcaccttttcgtcatatccatattcaataattctcattatagcgatattacttaaatcttgatcatcaaattgatccttccagttatacacttcacgtccaaaaacatatcttccaaaatctccataagccccaatacctcttccatattccgttgtcatagatttaattattgaatcaaatccacaatacccttttcctgatatttgttgcatttcttttaacttgatatctatttcttgtaatgaatatgtttttttataccagctactcgaatatggaggatttattttttcgtatttttcaaggttaataactcctttatttacagcaaataaaataatgcttcttgcataatctctaattaatacgttcggataaacttcatcttgtaaaaagatattagtataaataacgtcaactatttcaactaattgcggtactttatttattcttaaaatcgctccatataagctgatcaataacctttccagaacatatggatcatttacatcaaaaaaccttttaagatcctttaaaataattgaaggttctttcatatatattcttattaatgcagtagtagaaatatctcgcagttttttgtcagtacatgtaaacaaccaaataaaagttgtagataacaattcaaaatttccatactcgaaatgttgaaaacttaaattttgttttaaaagaatctctgcaagtcgcgtaggtacttctgaattaccatttatagatattgtccaacttccatctcttgtaggcatagacatcttgtaaagattctcatgtaaaaattctgcgtttaacggtgattctataatataagactgttttaacaacctttcgtatactaagctttgtaaatctatatctttttgtcttaaacatagatttacccattcaaaggttttgtcatttatattttgtacgtctctccatgaaatccctcgaacgaacgcttctgctatattaaaagttatacgctcaaagtcaattaaatctagccattctacttttaatttttctggaataattattgatagactctcataaactccataataaaatgagttatcagatgacaatatattttcaaataagtttttgtcttgttgatatctttctaataaaactagggatatatatatatctgcaaatctctcataagtaaaataaactaggctttcaccataactcctttcattaattgataaaatgttttcttctgctaaacctaaaagtatttctcgatacccaatagtatatggctttgctacattctctattacttcataaagccgctctaattcaatgtcatacctctcactctcaataaattccgaggcgatttctttcaaaattttatctactaaatttagtgaatttacatatgaaaatcttttatcaagtgatagcctaccattaaccttattaatatatttttctaatacttgaactatactccaacctcggaatccaacatactcttcttgaattgcttcacaataaatttgtaagaataggggattataacactcgttttctaaagaagggaatattaccggatttatcttataaaaattaaaaaatgggtccaacgcttccaaacttagattattaaatcccttatgctctaatttatacaacggaaaatcttcttcaatattttcaggtaatatgcttctcagataattactcctaactgataacacgacagcaatattttcaaattctttaataaaatttaaaaaattcatcaaatagcttttccaaaaatgtttaccttctccttcatttaaagcatctattataattacagtttgtttatttttcttctgtgctctgtcattaaattctttaaaaaaggactctttagaacctttgtaatcaatcaaatcaaatagttgtttataaggatgatcatgtgtatttaaatgttgacctaaaaataagaaaacactatgcccaacttcttgcaatcttttagcattgtctgccaataaatgtgatttcccaattcctgcatctccataaatcaatagatacggattgttaattaattgaggttttatcaaatacatataatcattcattgctctttcatgtttggttatttgattgattaaattaatgacttcatttctaatgttttttttagtttcttcattaatcttatatcttaattcctcaacttcttccataaagctattgatttcttctttaaagctcttcaaattattttctaaataaaaccctttatcattataattaatattctttaaatagtttaaaatctcttcaataaaagaaagattcttaaattctatatcttccttatacgtatctaaaaccacatttaaattcataatactatcttgaaacttattaattaacacagtgaacttttcaaaaattagcttgtcacttactaatgaatcaaatacaacatttagatccgtttctacattcgcttctgaattataccttttacctaaatctaatatatttcgatcaagtatttgttctaaatactcatccgtatatttttctaggtaagccctttgttgaatttcatataaatttttttcaaagtattcttttagactgttattactttcaacaatactattttgaacatttgccaaaatactcatttcatttactttaaaacttttgtccctatatccttcaagatatacaatcaactcattaagatattgtgttacaatcggatgagtttctatctcttctagcttcacagattttctataattatttatttcattcattgctatttgggataattgctctacaaaagcatctttagtaaccgttctatatgtagctccaaatacataattaaatatcaaaagcccattcttttcttcattcaaaaacttttgaaatgtatttgaatcaacaaatgtgttttcaaattgcttttgaaatgattttatcttttttagtttgtatttaatcttccatttttcgatgaaagaagtagtcagcaaccctattattttacttattataggttttagaataaatgtaaacttaagcaattttttcactcacacctttttaaattatatttttatgtacctttaaagcggttgccacccatacttaacgacaaaaagacgaattcgttttgaaaaagtttaatcaaaatgaattcgtttctttttggatggactccccttttataaaaaagttaaatcaaaacacacttagaattctttaattgaaagaggcaaactgtcaaaacttattttaaggccacactactcacattatttttcatattcattcacaccaatagagccactattatgtgaaagttctcttggaagagttttaaaaaaactttttactttcttagcatttgtcttattacaataaattacttttcttgttgaaaaacgcatctgatattcattatagaatcttaagtcattcctactaagtttaaaaatagaattatcaggattttcatacgggaagtttttctctctaagaatcaatagatgtttaggtgaaattggcaaacaaaattcattgaacgattgcattgtttttccgctggcgtgtttaatatttaccactggattatctgaaataaccaattcatccatcaccacaactttggattccatttcctcaaattcctctacaactccaagaaaccaatcaaatctatcacttagaagataatatcctaccctatttaaaatcccagaggctaagtgcatcaatagtttttcattatcatccatcttaacttcagcaaaatcaggtatattttccgcaagcatatcgctaaagttttcacttaattctctgaaagcaggaactctaatgctttgtaaagctatgaagaatactaaatctatcctatcctcttcatctaatatttctcttagactacaatttaacaaatttgtttgatcgtttaatttttcattaatttccctaaagcatctagcaaattgagactctaatacagaaaaatgctcttctaaaaattgcttgtcaaaaaaacgagaatcaacagatccgttagcaactttctgttgactttccaaaaactcctcagaaaaatcataaaaatatttttgttgtgcaacattatcaacatgcatattagataagtttttttccaaaactttatcataataatctaccttatcttcatttgcaaaatacttaagataaaaccttggtacataatgctgttttttaaccattccctcacctgttttctaagaaattttaataatctttatatattcattatatcatgttagaattttttagtgattcttataaacaatgcaacgattattaaatactacatatgaataaagaatagcagtataacatcatgctaccatttgtataattaattatttgaattcgcatgattattaatcatttttacatttgatcttaactaatagcaccctttaacgaaaaaaaattccaattaatttttcgttgttttgaatgtgaattagaaattttaatcgtttgccttactataccccaattcctatccaaccgtattttttttgtttactttcaatatgataacgtgaataggccccccccacagttaccacgtttgaaattataggtataaacatggtaggaacagctaaatagtaaaaccaattatctactttttcccacttatccaacttagagatctccttatttgctttcaatatatctgatctgattttttctgctaacttaatatctccattgttcattaaatttttccattcaattaatacctctctaaaccttttaatctcctttttttctcttaaccttaacaaatcatcaattgattctattctaggaatatattgtatttcatccttcatttgaactaaacatagtttatatacttcatgcatattatcaccttctgtttcgttcgatgtacatgatactctttttgaaataaatggtaccttaaattcttcagacattttcataagagagattattgatgataattcaaactccatatcaagcatgtcaaccacaaaaccaggatagctttcttctctttttaataggctatatatataatcaacaggattacctgtatccaaaagtctttctaatggtaaatgtgtgtaattaacagcttcttcatgaagccctatcctccataaattgataaaatcaaatagtccatctacatattttttggctaatcccctttgctcctttaaatgtggctgtcttttttgaaagtgtttaactaaatgatttattaataaaggttttatgttttctcctaactgaatgtcgttataatccacagtattttccacatcgttcaaatacctagattgcctaacaatcccctcgaattttaatttttctagtacagcaaattcacatggatcattcaaatatactttatcaaataatagtattaactctaaacacttcttttctaacaatccatactctctattacttttaaacttatttattaaatctctgtctaattcaccattttcttcaaattctacatatccatttttataagcgtttttaatcaaggcatttgaaaaatgtctgtctaagataattccattatgattttcggccatatttttccatcctcttcgtaaatatgctttaatttgtttggagtaattcatttcataataaactcgattttagtataaaactttttattaaatgttatttttagatagcagcctgcttaatttagaatgccaaaactttaatacctccatcattttaacatatatatccatatcaaaaagggggcaacggtgtatttttttataagcagtcaaatttttttcaaatggttaaattttattttaaatccatatattaaacaactattatattctaaaaggaattcgtgattcgtaaacatttgtatatacagactcttcacgccgaacataaatctctctaaacaactctatcgatatgcaaaaaatcccccttgttaaggattcttcattctctgatatatatcggtgctgcaaagtttttagagttactgtctatagaaacaccagcactatattaagaggtgcactagtgtactgatattatttcctaactcatccgtttgtctaaataacaatttctttatctatgtatgaaaatatcaagggactgatacttatcaatagtatcgcctttttcaaaagatactccctaatttgaacaagttttaaactaatcttagtttcatattctttcaattcttcttcaattttggccgtgtccaattcaaacaacctactaatctacacattagaatacatattagccattttaatttcactaaaatgtttccgtttttataacagtactgttcaatatctcacactaaaacacaacaaaccaacaaatagttttaaacactgaccaaacgaaaattatatctcattaattatttatacttaataaatgttctttaaatattttgaagctcttccactgtaataattcacttacgattatgccggcaaaattttttgggtttttctccccattttgaatctccgttactaatatacaatcatactttgcaggttccattatttttaattgtttaaagacattaatattatgcttttgtctgttagttaattctgtgcctactccacgtataatatcatcaagacccgattcataatgttcatattgatttctagcagccacaattaaatcaagtatacgtaattcttccactcctcgagctggattattccacatgatgtaattatcattatgcattataatcgtgccccttttatttttatccctttgaaaagatatgtcataaggattaccatgaacagtagatatagcttgtttagcaatgtgtagcaaagcaccagaaagaacattgattgaattctctttagccttaaattctaacttaagttttgctagtctacctagcattttttctttttcaatggatgccgatgtagacttatctttagcttcatatatctcgtaatcctctgttaatcctgcaatttctccccatgttaattgtgcttctttttccttctcttttattttcttttccaaaagttcaatattgtttttgtctttcgtaataatatttatgagttctgaaaccgcaaattcaatagattttaaatatgtttccaatttaaacttctccttcactaattgagcttaacctaacatttccagcatccatagatgtctgtaaatacatttaatcactatggttataagtgtatccataccaagcaacatcttcttgctgaaaaacacatatttcatctgggtctaaataatgattatagcttcttagattcatagatctgtactcttgaccttcattatttaagttaaaagctggcgcattttcttgttgctatttttcatcagcccttcttttatacgtataataaccagcataagctcctatgcaaacaccgataagtcccgtcatagtaagctccgaataaaaaagattttatattatttatatagcctttttatcttttaaattctgtatacatcctattgaattatatcaaaatcaggaaattaattgtatatttgaaataaagtttgatcaaaaacacctctcaaaccagcatttcacaatagataaaaagcattcatttcgaaaaaagattaatcaaaatgaatgctttttaaatcacttcctaattttctttattattttatttccatttggaaagtagtaatttatttttgaattctcttcaaaaaacctttctttaatttgcgccaacatattatctttagaaacttttccaggacttaaaataaattcacctgaattccccattaaaagtatactccacccatcttttaccccctcataatattcagggtgctcgctcttaatttcttctagtttttcttcctcttccatagttaactcatctggatttacatatgcatgaatgaaataatccttttgttcttccctaactaatcttccatagtcatttatttcaaagagccaaaatttagatctagatgtttcaaaatttagtatccggtttacctctttagtaccaaatggtggttttctaactgaattaaacagtcctaaagtggaatgaacttgagtcgcctcttgagcacctaaaccagaaaatccatttcctgcactacctatccatttagttctttgatttagctcttttccttcgactctttctctcgtaatttcaaataaatcttgttttactagaggccagaggctactaactatatcatagtcttcatattcttgtggccatttgtcaacataaatcattatcggaattgaatcgtgtcgcaataaatcatgcacatcaaatgtattacataacttaaaacttttactttcaataataattgattcatgtgttacctcaatatgatcagctgacattagtttacttaaataaagaattctttctttagaacttaatctcttaaaactaatattgtttctaatttttaatgtgttagaatttacaaaatcaaagagttgcgttggttcccccagatattcagacaaattaggtaacataaaattattgttttcattttccgataaaatggaataatcaacaaagtcaagaataaacgtggacaatttagaaaaagcataatttaaaatattatccttttgagtattttccattttatgagtatcaaaatattcatcaattttatctaacaaatcttttgcaactcttccttcaaggctttgaatatccttcactaactcatctgaaattgtggtaattgcatttctgtctacagataataaaggacgtttatccccaaaaaagtctatataaatcgaactcgaattattatattccctactataacgataattacttatattctctattattttggtatcactaactactattccatcaaccattatacctgtacttctacttaaaacaggataaacatttaacaaatcagatatattttcttggatattttgcgaaggcaacgccagcggaatttcaaattttatatactttgactccacttctacattaataaaattaacattttcgtatatttgttgaagtttaaccaatttttcaagataacctttattatatctgccatcgtaaatagctttacttaccttttcaaaatctatttttcttaaatcaacaggatgattatttcccattaatttttcagttgcattattatcaaatttaatatatataggaattaacttgttaggactagctaccatctcatatatcttataataaagattatcagaaatatcctttctatatttctctttgtctaactgagccagaaacatagtttcttcaatattttcaatatacttgttatttaatacaagatcatcttgaagataaatttttattaacgttccattacttcctataacttctctatccgcatcttccatatatctataatagaataattcatggggaccgtttatcataaaacttatatactcatcctgtttagaatatgatgattttgtacaaacctcaatctcatttcctaacataaagcaagataaaataccgattccaaattgagaagtaggcttaaaatcagtattccataaagcctgtttttgttgaaattcatttgacttgtaaaaagaatttcctatttttaaaaagtacctctcaataatgtcttttgtcattccaataccgttatccatgcaatataagtacttacgtccatctctaccttcattaattccaaattcgattctaccttcagtaatatccttatttgccaatgcacagcggcatgcatctaatgcattttgatatagttctcttaaacataagtattggtccttatatagacccacccccattaacaactcgattattttaacttgatccaatgtaaatttcatattagggacaggctgaaatttttctgaattataatcaatcccgcttctatttacattatgcgcaagttgcaagtcataaatttgactatcggctttctgattaatatctgacgacatactacctaagaatagatagtaattcgcaatctctttatctatccaatttaaataatcttgaagaaaataatagagttttggattttcaaaataaccggaaaatgatatctctctttgaccttttgcattaaaatccgttaaccaataatctaccccttcttgcttaaccttccaatgtaataaactaatttgattatcaatcattttagatgcctgaagagacttaggcgccctctcatagctaaaatgtattacatccgccaatctcaacattactgttaagaatttgatattagcataatttccatttacgtatctgcttttcacttcataattattgacttctgaataatctaatccatgccctaagcaaatttttgctaaatcctctgcgagcttcccgccccatgttcctcctaaagaatcttgaaatttcgaagttagattcttgcaattcttttccgaaaaaatatgatggttaattcgaataaattcatatcttaagttgaggctctctcttttatattctttgagatctcttatttctctaagtgaacttttgtacccagacctaaaaacctgataattgcgcacctttttagccaagttcgatataaaatcttcttcgttattctcaataaatatataattttttatttttgcaaaatcaccgtaaatagtttgagtattctctaaaataaaatctttagcttcaatgatagaaaaaggtttctttaaatcactattcaaattcatatccaagtcttcatcatataaaggaaattcatgactcccttcaatcattttaaataatttcacttcccattcaggcattgccataccagtatcatgcatatatgccgataatcctaacaaaaagaattcatatccagtaaactggtttgctttattttgagcatctattaaaacaagcatattttgcaagattttttctgaatgtgaaccatcatgaatatcaaaatcaggcaatgtactagtaatatttttcaaatgattaactatatctggtttcagcttttcatatagaacagctaatttttcattatcgtttccattatcttttccatcttttaaaatatcaataaaattcatcttgtcctccactttataattagtttactaaattgaaaattcttgaaatctttctaatatatttttattgagtataaccacgattttaggaaaaatttgtttccttatctttattttagaaaacatcctctttcatgtccatttattgaaaaaaaagatggtacaaaatgtattatatataagtaccgtcaatcattaccttatgctatttattcaaatttatttttcttacctttgtttaaatatcttcctaaaatatacaaaatgtatattcaaattaactgctttattaaaaaagtgacacgtttattaatcaaaaagagatatgaattccttatttagtttactcgataaaatgtaagcactttaaatactatttacaggctacggaaatcatctaaaagtgattctttaagttggcgtttattaatctccacaatcttttccgatttagtattaacaacagagctgttcaaatccaaaaattcatctgctttcaaattgaatatgttctgtagagcttccttaactacagaatcagcttcttctcccactttcattaaatttctaagctttggatttgtaacagaaccatttataaacatctgataaattgtttcttgttgtaactttattttcttttcaagaattgcaataagtgcattttttttaattaatttgtcctttaactcacttaattctttctgtaatacactatagttctgttgacttatctttaattctctttggtaaggaagaagttgtttcaatagttgttttgaatccttaacattctgttgtacaatatcctctatccttggtaaatttacttgaatctgattattttgcgctaatgttttatgaacaacagtattatattcctcaattaattgaaatccccttctttctgatcgaacccaataattatcagatatctcttcatttagccaaggaagccccccttccatataaaggattttcgcatatttacttaaagcaatcttgggaacttcagatttaattcctttctgttttacaaaactcaatataatttttcttatttcatcctctggatattcttttttctttcttcctacctttcccatgttacaaccaaccttcataagttttataaaatttatcgatattctgtaataaatccctcaattgttttgaatttattgctaattcccttgttagattgggatttattttattataagtatcgctaactaatttcagatgtagattaagcaatgttttatataaggtgagcacttcctcttgactctctttcatccatctttcgataaattcccttttttctaaaaattcatcatactcaattctccaatattcgaagcaccggaaacactgtgttttacaatcctttattagtgctgtacaatagccaatctcaagcttgtcccactcctgtttcgaagtttttgctggtgaaaatataaatctttctctaaataattttccaatatgccctgccttgcgtgaactcccattaaaaaaaactgaattttttaacggttgacctgtaagactaaacattttaataagtttagatatccctgaatctgtaagaaaaaactcatgttgttgatagtgacgttgtgagtatattgtatcgtgtccccctaagcgagctatctcaataggatggaacccttgtatcattaaggataaaaatgcaagatgtctagtatcattaggtcttactcggcgttcaaaatcaaagtttaccccattaattctgccctgccttatttctttttccgagtcttctccaatgcttctaactgtaaaattatatggtggtgcagtaattaccttatcataaaactcatgaagaagatccctgaaaatattacatctgaatatatcaggatttctacgtaatatcggttcatttaatatccccttatgtgctctataagataagagagtttcagaatagccgaattcctctgtcatttctacatattctttaaccatggaataaatctttttcgaaatttccaattcatcaattactttttttccaccttgccccctattttttattctaggtaatttgagatagtatctatcatcttttatatatatacaattcctctttaaaagaagaaactctccaattcttattggaattactgatgtcaaatgccaccaaatacgtattggataataatatatatatctctgactatcactatttgtttttataaaaaaatcatttaaaacccatgcaaatttaaggaaatccttaacagtaggaataactcttgttcttggcttaacagacggaatagttgacaaaaaattcagatacccttcttttccttcaaaattatcatagtaattataaaagttaaaaatagctgaagctatagtagctcttactgtttctcctttggacaatattctttgagtaaaatcttctaataatgctattctaaatatatttgtttttatcacttcatctagtacatacttgaaaatagcacttacagtactgaattgatacttaactaataaattagctgcccaacatttcattactattgttaatttttctacttctgatacagaacatccactcaattcttctattaatctactgaaacgaagataaaacatattatctctttcttcatcatataatttccatacattttcgtaaaaattaatttctgtaaacttatttttttctatagtttctaagttttcgatagaaagttccatgctaagttctaattcaaatgcttcatcacttaattcttcaatctcaattatttcactcatgttttctcacctcacctctttgtggaatatatcgtgtaatagaaggtaattgtattaagagagactcaaattcctttttactcatataaaaaaactcatatataacggatccaaactttatttcagcttctttaaacaactttaaatcctttaaaaaaagaattgcatttctttcaaaatctcctttgtatccattcttttcagtatctctaatgaaaaagctgatatgtttgagaatgcgttcagtaatcccggataacgcataaaaattataaatagcaaaaggacaacttatacaattctctcgttctgtatacaaacaattgtctgatgacaataaacactgtacatgtcttgttttagaatgcaacattcccatgtcaagttcattaataatacgacgaatttcctctccatcaaggtctttaataaggctttccacagcgcgttcttgctttgtaagatataataaagcatctgctatcccttctaattttaaatcttttccaaacttatcataaataatgttaatttgatgggttctttcatcaatattttgtgtggatccaaacaaaatgttagcaaatccatctgctataaatccaaaataatctctagtaaaaatttgagtactcagaaaatttatatcttgttgatttatatgaatgtatatatttgtggtttcaatcgacttatgattacgaaggaattttaaaagttctaattcatgcgcaggacctttttgacttttaattaaattataggcaagtgttataaaagttctattcatttttaatgatgaaaatttaaggttttcatctggaaatgtatcaaaaaaagccttataaggataactagtgagctgccgatttttagattgaaaatcaattaacgaatcacttaaaggattaagaattcttgctcttatttcacataaaactgctgcatatgcaataggaaggattaattgctccgaacaataaaaataacgatttgcaccagttttagaatgctttaaattcttaatttgaatcttccttattattttcttggcatcttcaatacttaactcatgattctgaatccactctatactgtcaacaatacctgttccctcaaaatttattctaggaatttgcatacagtcccaatgtctccaagcattatttaaatgtaccaatgtatacaaccaaactgattcatagcgattataaaaggcatttcttgaattattttgtaaagactttaataacacttcttttacgctacttacagctttttctttatgaatatctagattagaaatatatttaaaaaactccataaattcttctaccgtataaatttgcggcgctttcttcttcttactccttctcttatacggactatttatgttactaattgtaaacattttcttttgtaaagcatatccctccatttgatcaatttcccttaaaaatatataaagtatttttttcactttttctttggtattattattaaaaaacatcaaattaagctctttagaggagtacataaataactccttatcaataatcctctcagttaagaccctcgtaacagaaagatactctaacaaccttgcatttttcgaaacaaaattcgaccctgagtaagattctgatttaagccttataaatttaaaccacaatctctctgtttctttacaaaaaccagaaaattccacatcttccgcatttaatctgtacataaaattatcatatatagaccccctatcaagataaaggtttaaatttttattccgtcgctcatattctttaataatgtcctcttttaaatataaatatctaccattaaaatatctaggaattcccctcattaataaaggtatctccattgtctgtatacttatccgaataacatccacgtttatattaaattcattcaaaatttcctgtctagtatagtactttaaccttagctccttatccatttcctctttttccttttttaatgaaaaaatttcttcttttctaaaaaaaacatgtctccctattttctgactgatttttaacaatccttcttctagaagttttttataggtatacacgtttaaatccaataatttaagaacatcattcaatattattaaatccttgttcgatatatttaatcttattttctctcctaatgttttacttctatacttcaaaaaatttctaatatccttcttattgcaaaatgtgaactccctttttcttataaattgtatctttcttatattaaaactattgattacaaatatcgcttgagtatacccaatacctgccatcttcataaattcatttatcgtcacatatttttccaaaacatcaattacttcacgctttctcacatagcgtttcgcatacctatattcctcttgattattcaaggtgaataatgggtatttcagtgttcttaagtatatttgaccttctttagaaagagaaacaaggtttttataatatgcatttaataaagatctgttgtcaaggttttttagtcctacgtacgcccaaaattgctttgtagtaaaatattctttgctaaattttctttcccattgcatatgtttgtttaaatcttctctatgaataaaaaccttttcattcttatattcaactctaataatatttttttctacaagaaaccttagactgttttctgttagcttgtatttcaaatgattcaactcaatatattcttgaaccactatttaatcccccccaattactaatataccgatcatatacctgtctcttattaaaagagtcctcataaaaaccaatatcatccataccctcaccatatacactagaaagaacatttacgtgttcttgtaccttactataagaagttctcttctcgatatattccaatgttgcagttaacgttctatccccccttagattagcaatctcctcaatactcagacctaaatcaataagaaaattggtaaaaacacctctacctatatgcgtggaccaaggaagacctgttaaaaattccaaatcctcgtaacggcgatttattctcagtttttccaaaaaacgttccttgattcttaaaaatcgcttagcatatccagtaccacttaaagctagtcccgtacttttagaaataaataacgccttactttcattacttttaaattgttttttcagcttttctaatcgttctatatgaatgtgataagcctgccatagtttctcatcatctaaaacaaatacttctctaggtctcttgacttgcacatcatacctagatgataagtgcttgaataaatgttcttgattatcttctattactaaccacatcccatcatttcccctaaatcctttttcgtagatagattctcttgtcaaattataaatgctaacttaaatatgtacattaacgcttgaataaatatgtacattttcttcatttcaattaatggaaaaccgtagagtttctatccttaagttgatgggcatgccccttcctcaaggaacgtaaaataagtaggtgggagatgaattggctaaaatgataaactggtgaccccgtatgtagaagtaaaaaagggggaaactattgtataattatcgataatttagggggcgccaaatgaaacataataaagaagtaacacttggggattacgttcaattttcatatcgtaaaaatcataatttgaaattaatgggatttgtggtgaatgttttacaaaatacaattgttgtagatattgcggaaagaatggatatcgaggtagatgattttaggcaagttgtaaagcatggttattataataaagtggttcataagcaaataaagaatagtgtttcataaaaagtgctcctatatatataaatttaggagcactttttatggagagaattttcgcaaagatttttttgtctgaggtataaaattttcataagaaaatacgttttgaagatattttcttatttgttaattaataattttttcaatctttatagctgttatggatttaaaatattattcataaaaatttcacataattttattaaaaagaaaaatactaatacttgttttaatactttacttcgagtcattaaaacaaatttactaactacgaaacaaggaggcatcactgtggacattcgtgaaggattaattccaacagctttaggtacagcagtgacagcagcaggttatgctcttaaacaaactcgtggaactaataaaatgattgcaaatacagtatttggttttggtttagcacacgtcgttttaggtgtaatcgatcttgttgaacatcgtcgttagaacgaaaggcaagcattgatatatgcttgcctttttgggagtacatttattattcatttttcaaaatatgtttgtatgacgtaatcattatcaatgtaattaaatagttacactacaaggaaattagaaagtaaaactgtgagcattgaattttatgaaatgagatggtgatggaatggaattttcttctgaaagtaatacgtatcatgctggtgacattgtttatattttttaccgaaatcctcatactcaagacgtagctaacatacaagctgcagcagttgtaaataatcctgaaagacctaatgaattagcactatttctttacgaaacgtattatccactaacaaatgagatggctatatatgctaccgaagatgaggcaaaccaagcttacacttactattatggtgatatttcagaggggatgttagaatgaataagccatttatgcctaagctcgtatattttgaaccgaaagcattggattatcctttggggaaagagctgtttgagaagttttcaaagatggatgttgaaattcgacatactacttcccataatcaagtaagagatttgccaggggataacgattttcaaaggtatcgagtagcaaaatccacgctggttgttggtgttagaaaaacactgaaattcgatacttccaagccttcagcagagtatgcaattccttttgcgacgggatgtatgggacattgtcattattgttatttacaaacaacgatgggaagtaagccttatatacgaacgtatgtaaatgttgaagaaattttagatgctgctgataaatacatgaaagagcgtgcacctgaagtaacaagatttgaagcgtcgtgtacttcagatattgtaggaatcgattatttaacgcatacccttaaacgggccattgagcattttggagaatctgaatatgggaaattgagatttgttacgaaattccaccatgtagatcatttacttgatgctaaacataacggaaaaacaagatttcgctttagtgtaaacgctgattatgtgattaaaaactttgaaccaggaacttctcccttagctaaacgaattgaggcagcaggaaaagtagctagagctggatatcctcttggtttcattgtagctcctatttacctgcatgaaggctggaaggaaggatactatcatatgtttgaacgcctaaatgctgaattacctcttgatgcacgggatgatattacatttgaatttattcaacatcgttttacaaagccagctaagagagtaattgaaaaaaactacccgatgacaaaactagaattagatgaagagaaaagaaggtataaatgggggaaatatggaatcggaaaatacatttatcaaaaagaagaagaagaggatataaaaaactatctgtattcctatatgaaacagttctttcctaatgcaaaactagaatattttacataaaagaaacgaacaaaattcattatatcatcaatctaaaaaattactcactcaaaaaagtgatattggtcaacaattcgctaataaatcatttgaaaaatttatatacgaaagtcttttatgtaaaaatatgtttcattatgaactgaatcccaacagttaaacagaaaaatacagcggttgtatgaatataagtccggtattgtaccgggctcattctttttaacgttgcatcaattcttttgtgaacatattaatttgaacatgtttaaaaacgaatcatcttttgacaatggtattagcgctttagaaagaactttcataaaaaatggtactaataatccctccaagtattactcccatagtagaatctaataacaaaaatctaattgtttaattagtaattctaatctaccattttttgctgtactatcaactaaagaaacagtaaatggttgttgaaacatattagaaaatcgagcaattaaagacataatattatatttagcaaaagccgatgcaactaaagctaatttcgccccaacaagttgaactccatatcctaaaacttctatagaagtcataagcattaaaaataaaaagatacaaattactttaaaagtaataaactccataatcatacctcttaagtttctataaatacataactcaataattatattaaaaacattcaatattttcattaaaatataaatcaatttctattttataatcaaaaactatactcctttattttgaatgatggcatcaccttttattagaattgtcccttggtttagcaaatgtttttttgtaaataatatatttgttaaaccattaattaagggggactagtatgccgcaggatcgaaaagaagaagtgcaaaacgatacatatgaaggaaaagaggttatgccagataatccacaatatctaccgcgtcacgtgcaaatggagctgcctcccgaattttctataaatcctctttttgcccgcaaaggagaatcagtcgttccgcgctttcacatgcctgatgaaggcatgttaccagaaacagcgtatcaaatcgtccatgatgaaatgactcttgatggcaatgcacgtttgaatcttgcaacattcgttagtacatggatggaacctaccgcagagcacttatatgctaaatcatttgataagaacatgattgataaggacgaatatccacagacagctgaaattgaggagcggtgtgtccgcattttagccaacctctggcattcccccagcccccttacaactatgggcgtttcaacaactggatcgtcggaagcctgtatgctcggggggcttgcgttaaagagacgctggcaaaatgcacgaaaaagagagggtaagccggtggatcggcctaatattgtgtttagttctgctgttcaagtcgtttgggaaaaatttgcgaactattgggaggttgaaccacgctatgtgaaggttagccctgagcatccccgattaaatcctcaaggggtccttgcagccgtggatgaaaatacgattggtgtggtaccgattctcggtgagacttataccggactttacgaaccggttgccgccattgcaaaagcgttggacgatttacaggagagaacgggactggacattcctatgcatgtagatgcggcttcgggcggatttatagcaccgtttcttcaaccagatttagtctgggattttcagttgccgagggtgaagtccatcaatgtatccggacataaatatggattagtctaccctggcttgggttggataatttggcgggaagctgatgatctccctgatgatttaatcttccgcgtctcctatttaggcgggaacatgccgacttttgccttgaatttttcacgtcctggcgcacaagtgcttctacaatattacaattacctgcgtttggggaaaagtgggtactatgatgtccaaagggcttctcaaaaggtcgctctttttcttagcaaggcaattcaggagatggaaccattcgaacttttgtccgatggttcggatattccggttttcgcttggcaactgaaaaaaggttacacattaaactggaacctttatgatttatctcgacaattgcgtgtgttcggctggcaagtacccgcatatccattgcctccagacctagaagcagtgacaattatgcgcgttgtggttcgaaacgggttttctatggatctcgcgcatttatttttgaggaacctcaaacaggccgttgcctttctggattccttggatggacctatgccacatgatacgaaatgtgataatgggtttcatcactaattggggagcagctctcgtcgtcgttaagttgagctcaacacccataacttttcgagctatcgactgggaagaggtacagaaaagctgatggtttcaaccaagggatacatgatgataggtgatgaacaaattgatgcctgagggctttacaatatcaaatcatacgcccagttttcagaaatctattggcttttcttctggtttcgaaagacacaattcaaatctgttgaagagttaaagaaatttgtagctagtatttcctttttgggggtaccattacctgctttaggagttactccaccattacattggattttagcggataaatggggtgaatctattgtattagaatcgacaaggagtagtgactaatagtcctgagtttaattggcatttacaaaatgtaagacaatatataggtcttaaatcgcagccatgcgagggggatataccattaagtgcttttggacaaggttcaggttcaatgggacttaatggagatttcaccctactatcaaggtttatacgggcagcgtatggtaaataaaatattcagggtatagataacgaagaagagggtatatcggtcatttttcgtattttgtaaaattgtgaggttccaaaaggaggagtaataacggaagaagatacattagataatactatttatacaagcgcaacgtgcatggagtctggtacatattattactatatctatgattgtagataaattattgcccttcgttattagtaaccggatagctgcttaacgataaaaatgaatttgccaattttcttgcaaaatgtaacgggtgctctaccgattggatatgaatatacataattaagggattcatgtataaccagtgattatgtaaagcactgacaataattccttgttgtacaattgatttcataaatgcagggatctcttcttgtagaaccgcgatttctcctaaatttaatgcattgccattttgatccaacgattcaaaacttactccgacgggaactacataggcacttggttttccttgaaccaggaccttaaaattgcggtgaaaagacaccgaacaaccaccttgatttattttactctttcctttaagaattgcagcaaattgatcagaaatgaaatttaaattagacataagttcaattcctttctcgtgctaaatttattcatttagaaatttaatttaaaaaatgtagttccttcttttaaagaaaagaactacttataaacaacttttctctaaaataaacaggccgatatgtgcaatttgtaccctgtttattttagaagaaatataaatgctatttcccaacaaacataacttaatgaatcctttctatatatcattataaaaaattcataaagtaggcaattgtacatctttattttatgtaggttagataaatatgtgccttaataagtctgtgctttctttatgaaattcttattggtaattaaacaataaatttaatatattttaatgattgtatagggtaaaacttaatttgttttttcattttctcttttacaattgcttgtggtcctttgttaaaattgtagtaatatattgaactgtatataaagatagatattttaaatttttcatcctaaaataacttactatatctagctaaaaatgttgttttttcaatgaagaagtaaattttgggtgtatggtttattggttatattaagtgttttgttaatgttaaacataactcttattgcacatacatttttttagatcgcaaagaagaatttattcgtctgtcaaattctatgttaactggtaaaacagactaattttagatgaaagattctataataaatctggagaaacaaaaataattgaaaacatttgagcatggagataaaaaacgcttaacgaaggatatttcaaaagagatggagcaaaggattcaaaaatcaatacagcttgttcaaaaaaatataaggtggatgtattagcattaggagaagtatataagcggaataattataaagaatggaagaaaataagtaagaattgggatcaaggtgaaaattattttagtaatgctgacattaatgtttatgttcatctagtaattgaacattcaggctcagctttaccgaagagagtgaaataaggtgatttaagtcgttagcggattagaaatacgctaaacgatattaatgctggttctgcattttcaatcagtgcagacttatgtactttaaacgtgattaataaattatatttggcttattatgatcctttggttagcactagttagagttatagtaaaaatattaagcagaaacgacttatttttaataataagaggaaatatgttactgaaaagtaaggagacaaattattacttttttaaagagtaattaggtccgtacaatgacgcattaaagtgattcataagggattctgaatgctaagagagtgagaatgaattacaaaagaaaggtgcataggcgcctttctttttttgaagggattttttgttacgagttagtacaaaattgggttcagggggtactataaaattttagcttgatggcgatggggtagcatccacgtctatcaacatcactacacctatatttaatactgcgttacgtgccttgaatcaagtgaaaaacaagacccattttgtaaaaactgaaaccaacgttttctaaactgaacttgagccatatctgcatgaacatgggcctccatttttaaagcttctggtataggtctaggatgttgactttctacaataatttgatcctcttttagtactcttaaactaaatttagctaaaatttggtctagtaaagggaagtactttaaaaatgtccttccggtatatcccataattaatgtctcttcttcatcaattggtgtaaacgtaatgtactgaataaatgactcattctcctgtttgccactgtgaagcatccactgatgtgggaatttgtattcaaggtaagcatcaccatttgagaatataaactgatccagtgttccctccagcttataattggttgattcggcttttgtttttctaccaatcgtttttttatgtacataagcaagatgagcaatatccagcacagattcgattgatcgagtaaggtgtgcattccaagtggcgtggaagaaagagagtttaaaaggagtgttctccattacatgaaaagtttgccattcaggtggagtttcctcattatcaggatatatccaaatcaacccaatcttttcttttacagggtatgagagggtatgagcaaatttcgggataggtttattgggttgggatggaattcttacacaagtaccacaactatcgaactcccaaccatggtagggacagactagtttaccatttactacttgtcccagtgataagtcagcgccacgatgagggcagtaaggtgatagggcctgaacttcgtctttttcatcccgatataatacaaaatctttgccagcaactcttttttttactggaatcttttttatatcttttgcataactcacagcataccaattacgtgggaatactctatttatatttagagtcatttattttctccttcttttttattcacctagtagatattagtggtgtctactgtatactgtctattctatgctataaaatattttaaatgttcgtctaaaattaagaaatctacagtttgatcaaatcattatgaaagcctgtataatctctctaaatgtaacaaaaatgactatagtacaatagattttaaaaaggagaatgtcttattttattgaaaattgagatattaagcaatattcctattgctattaaattgaccattaaagaacttccaccaaaacttacaaatggaaatggagtacctgtaagaggaaatagtcccgtaataccacctaaatttacaactgattgcataccaatcatacatcctataccaattgctataaaactgccgaatggatctacacataattgtgcaatttttaaggagcgaagtaccatagtcaaaactcccaccaatagaataaatacaccaataaatcctagttcttcagaaactattgccattataaaatcagtatgtggttccggaagataccctgttttttgtatgctatttccaaatccacgaccagtgattcctccagagccaatggcaataaaagagtttacaagctgatatccatttccttgcgcatcaagaaagggattgaaaatcgtagtaatacgtgtcttttgaactgctgataaactatattgaatcaaataatataaaataggtaaccataaaatagaaccgatggtagttcttttgattagtagatttatatttattcctgaacaaagaaatatgctaaaacctatacctaatattaaaagtgcagatcctaaatttggttgtttaaagataagaaaaaaaattgtagctaaaaaaaataaaagttttccgataccactccagttatttttagcttgttcttgtcgcaatgcaaaaaaacgggctgttacaagtattgttcctaatttaagaaattcagctggctgtattccaaagatccatgattgagcattatttaccacttttcctttccataaaaccataattaataaaaaaatccccccaatcataatacagattgagactattcgttttttccatatttcatatgggagtaaagcacaaattattaatcctattgttcctaaaagtagctttgttaattgagaatcaacaaaatgtctactgttataaccgtaatgttggacagcgacaatggagcttgcactatacatcatgataatgcctaaagtacatgttatgaatagaggaaggagcaatagataatcgagttttaatatttttttcattttaatatcctcctgatttaaaacaaaacataatattacatttgttaatgaatagaatcttgttctcgtcaattactaaatatgacttttgtttagaaagattctatcacttattccctgttttttacgcaaaaatccccctagtatgtaactagagggattcaaaatggcatgactaaataaggcttttcccccctagtagagctttggcactatacaacgtaaagtaatgaaaattcattacttagctatcttaagaagagccttaatccgacaattcctgttctacccattggcgtctttcgacatttttgggcaatagcctgtgtttgcataggagcctcacctaacaggttaagcaatataaattttatgtgtttgtttcgtgtagcaagcataaatatattttttttgcttgtcaagcaaccatattgctaattttatttgttttattgctttatagtcctttgagaaatgatataaaaaaatgtctgtaatcattctgtataagtacatatttttgacttgtagtgtatcgtttgattaagtagtttaaccatataaatttgataaacagtaaagaagattttaatcataaaagaagattttttgtgaatgttctttttgtatacagaatgactaattattcatcttttgttataaagttggaatttgattaaaaataataagtttcatatgttttattacgtttcttcgaattaaatctatttgaattctatgttttttaaggggaattttaaatttataataaaatataatttcattttctataaaagatttttttataaatggaattgaaagtcagttgacaaatattaaattctggtttaaattttgaagtaattcaataaactttgttaggtgaggctcctgtatagagaaacgctgctgcccaaaaatgtcgagagacgccaatgggtcaacaggaacggtcggattaaggcccttcttaatgtagctggttataaaaacctatgctatacagtgctaaaactcaacgagggagtggtatacgatttgatagaaaggcacctctgtgatttcggcagagctgtcttaataatcatttgtttgtattgtgaaaaaacctttactcctttttgagtaaaggtttttctgtttaatgttatttatttttatcttgtctatattcaaaaaggaggtaattctaactaatgaattgattgcaatgtaactattattgctctaataaaaaatttaagacagataaaataaaacaaaaccactcatgaaactctagagtctcccttagcaatatgaggaggagttaacatgaagaaattattaaaggaattacttataacccaaaataacttggatgcagagaaagttttacgtcttccgtcgtatgatattgcgcaagaagtaaaacagttttcaattgaagatcaagtcatattactaaatacgattcctgtattaaaaagctctaaagttcttcaatatatgagtgcagaagaaaaatataatatcttaattcacttatctgaaaataaagctaaaaagttactgaatttacaaccgattgatgaattagtagatttacttctagcggttcatccggaagaacaggctaaattaatggcgtatctagataaaattacaaaacataacgtaaaaaaattaatgactttcaaacctgaaacggcaggaagtcttgttacaagtgattttgttgcagttagaggaaattggtcagtaaaaatgacattgaagtacattagggaacattctgaaaatgtagaatcaatatcttatagttatgttcttaatagtcatggttatcttgagggaatcgtttccatacatgagttattactagcagcagatgaagagatattatctactatcatgatgccagaggtaatttcagtacacgctgaagttgaccagcaagaagttgtaaaaaagctactgaattataatttagcagcaatacctgtcacaacagcaaataataaaatgattggtattataacatttgatgacgtaatgaatgttatggaagcagaagctacagaagatattcaaaagttaggcggaagtgaaccattgaatcaatcttactttgaagctagtatttggagcattttcctaaaacgtctaccatggttattacttctttttgttgctgaggcatatacaggtacagtattaaagtattttgaagacgaaattgaaactgtagttgcccttgctttctttgttccattattagtaggtactggagggaatacaggaacacaggttgtagcaacaattactcgtgcaattggtattggagagttaaaatttaaagacattttccgtgtaatgaaaaaagaatttgcaattggtatgcttcttggacttgcacttgggatagctgggctcattcgtgcttatatgttaggagttggagcagaagttgcgcaagttgtagcaattactttattatttattgttatttgggcttctcttgtagcagctgttttacctttaattctaagaaaattaaaactagatcctgcagttgtttcaggtccatttattacaacatttgttgacggaacaggattaataatttacttcatggttgcaaaaacgttattaaatttataaatatacactaaaaaaacgaaatccggaataagtatgttgccttaattgctaaaacatagtggggaattcaggcatgaggaaatcaaacacttttgtctttagataaataatattttaatggatttattgaatgtaatgaatgctggaggataaaactatgaaacatctaagaaaaatcttcaaacgaattttgcttctattttctattttaatgattattggcgtaggaatactatttggtactagctatggccgagagcttcgtataacaatcgctgggagtatattaacttctcagcatccacaatatgcgaaatatacattcctatcccaaaaggaactagataaactgcaagatagaattaatcatccaaaatggtcaaacagtgatgagcatatttataaaaaaatagtaggaaaaagattagaagaattaaaaaatcagccattagaaattgatgtagaaacaattaaaagtaataaagatagtcgctttcttttcgaaggaaagttagtaacaattagtaatcctttcaatgttaaacttgttagccatcaaggaacacagggtgctaacaggggagaaaaaattagtgtaatggcaaaacgtaatcatgcacttgttgctgtgaatgcaagtggatttgctgacgaaacaggaaggggtggaggaaatgttgctactggaattgtgatagaaaatgggaaagctattgatacaaatatggatagaaatgcccctacaattattacgggattaacaaagtttggtcaaatgataacaggaaattattctacccaacaactgttggataaacaagtcgtttccgcagctggatttatgccacagttaattgtaaatggagaaaaaatgattacagaaggagacggcggttgggggtcggctccaagaagtattatggcccaaaaagaagatggtacaattatgtttctagttattgacggtagacagacacatagtataggagctacgttgaaagagtgtcaagatattctatatgaaaaaggagctataaatgcaatggcaatggatggaggttcttctgctacgctatatttaggaggaaaggttataaattcaccgtctacattatcccatgaagatcgttatttaccgaacgcttgggtggtaacagcaaaccaaaaacaaaaaataaagatgacaattgatgggagaaaaatagataccaaaacatcagatgaatttgatgcgaacatttcaacgaatttatgaattattaaaaatagaacaaatacatgatttttatctcgttagttggaaaattaaaattattttttaaaattagaaattattatttcatattcatgatttgcacaatatcaaacgagagtgatgaggattccaaatttacggaattcttatcactcttttttagtttttggtaaatatggaacaatatccttactttcactgtctattaagcgttaaaacattttttattaaataaattaagaaaggaatcatcatttttaactaagggagaagattgaattgaaaaaattatggatgctgcttttcgtttgtttcgcggttatgttggtaggatgtaataaaaacgaaccgccaaaacaagcatttgaagaatatatcaatttatggaatgatagaaaatttacaaatatgtatgatcatttatcagatcatgcaaaaaaatcaatttctaaaaaagaattcacagaaaaatatcaaaaaatctatgaggggattggagctaaggatttaaaagttaaaatgaaaggagagaatacgaaagataaagagctttttctttttgaagttaagatggataccgatgtaggatcagtttcattcatccatgaagcaaaacttgtgaaagataaagagtcttggaaaatagattggacgccagacttcatttttccaggaatgaaaaaagattacaaagtacgtatgcaaatagagcaaggaaaacgcggagaaatatatgatcgaaatggaaaagggcttgcaacgaatggtaaagcgactgaggttggaattattccagagaaactaggcgaaacagcagcgcaaacgaaagaaatagtagcacaattacttgatatgtctatagaagaggtcgaacaaaagctcacagcaaaatggataaaaccagactcctttgtaccaattggtattttaaaagagggaaccagacagaatgattatattgaattagaaggagtttcatctcacccagtaaatattcgtacgtatccattaggtgaagcagcggcacacttaactggatacataggaaaggtgaatgcggaggagttaaaatcacttcaaaaacaaggttatcaagcagatgatttagtaggtaagaccggtttagagaaagtgttagaaaataaattgcgtggtgaaaagggtggacgcgtatttatagaagatgagaaggggaaagagattaaaaacgtagcaaaaaaagaagcaaaagaaggagaaaatgttacgttaacaattgatgctgcaattcaagaaaaaatctttaatgagatgaaaactgaagcagggtctagtgcagcggtcaatcctaaaacaggtgaaacaatcgcacttgtaagtagccctgcttataatccaaatataatagttagaggagcatcgaaagcccaacgagaagcatggagtaacgactcgaaactaccaatgacgaatcgctttacacaagcatttgtaccaggttccgtatttaaaacgatcacaggtgcaattggtttggaaacaaacacaataaatccgaaggaagaatttaaaattcaaggatcgaagtggacaaaagattcgtcttggggaaattactatgtaacgcgtgtaaaggatgcaagtccaattgattttgataaggcaatgaagtactctgataatatttattttgctcaacaagctttgaaaatgggaaaagatcagtatgtaaatgaatttaaaaagtacggatttcatgaaaaattaccaatcgaatacgaacttcctatttcaatcattgcaaaagatgggataaaaaacgatattcaactagcagacacgggctatggacaaggacaagtactaatgacaccacttcatttagcattaacatatgcaccgattgtgaatgaagggaatattccgtcgccacatcttttaaaagaagcaaaagtagcagggaattggaaagaaaatgtggtttctaaaaagaatcaagagatattaaagagcgcattaattaaagtcattaatgaccctgatggcgcaggaagaattgcaaaggttgatggtgtaacgcttgctggtaaaactggtacagcagaactgaaagagtcgaaagaagcagacggaaaagaactgggatggttcgcagctttcgatgcaaatgcgccagacatgattgttacaatgatgattgaagatgtaaaaggaagaggaggaagtaacgttccaggtgaaaaagtaaaacatgtatttcagaaataatacttaattatatggtgaattttttgactaaatttattacaggtttgcttaactcaaagatataaattggggaaaatatagaacaattaaatttcaaaaaagcattctcgattagaaagaatgcttttttgctgtgattctagaaaagttgacattgttaatggcaaatagaaggagatagcaaattgaaatggacaagtggagtgttacgttaaattcaaaaaacagattttcatgagtagaattttatcattgtatgctttacttgttttttagtagtattattctgcttgaaaaagataaacaatggaacaaatgaaacttgtatcttgtctatatattgaaaccataataaaagtgagggcagtttttatgtttattcaaataagtttgaggtgtggaaatggaacagacgtttattgaaaagtgtaatcatgatgagctggactatgttataaaagactattggcaagatgtatggaattattcatttattattacgaaagatccacacttatcagatgatatcacgcaagatgtatttataaaggtgtttaaaaattggaattcatttcgaaaggagtcatctattaaaacgtggatattaaaaatcacaagaaatacggcaataaactatttgaaatcctcttattttaaaaggatatctttaataggattttttagtgacgataagcaatccctgtcagcagaacaagaattttttaagcaagaagaaatgaatgatgtgtggaaggttgtattagaactacctaaaaagcaccgtgaaataattatattggacgcaaaatatgaattatcttatgaagaaatggctgaaacattaggagtatccattggaactgtaaaatcgagattaagtagagcgagaagtaaggtttcaaaattaataggggagggtagtagtgatgaacaataaacaaaatcctgactggtatagaaaaataaaaaaagggccaatggagaatcgtaaagatgaagaagaatttatttctaaaataaagcagtctatatatgaaaataatgaagtggattttgtaaaacataaaagaccatttcgtaaaaaagcattacctattgtagttgttttggtttgtacaatgttatttttcattgttcaacaaccttggcttgatgataataaatcgccggtacaaagtagtactcaaattaagcctaaaacaaaagatgagtctgctcaagatccatcattaaaacaatttatgaatgaactatatcaaagtacgaactcaaaaaatgaaaataacttgtacaaagcgttaaatgatgaagttctatttaaaggaaagagttataggaaggatgaactgaagtttgatgaagatatctttcatgagttgcaagtcgcccttacaatgggaggagagtttgcaaaagatacaaagcaagtatataaagtaccaagtggattgacagaaagtaaccaaccaaaccaagcgcattttatatatgcaactgttactggaaataaaacgaaaattttagctgaaccaaagagagaatcacaagttttatatgaaatatctaatgaaatggtaaaagcttggattccagaaaaagtgcaaaatgatggatatataaaaatttcgacaattaacggtaatactggatatgtacagaaagagtacgttttaactgatattaaatattcatttatgttcgaaaagaataatgaaggaacatggaaaataataaatatagattctatatggtaaaagaggaaggttcactttaatgaaccttcctctttgtttttattctctttttgaagagtattccagtactctaaaatttctgatgtaacgagagcggcaatgtttttttctgaattactaccaggaataacgacagaaacggcaatttgtggatcttcagtaggagcatatgcaatgaaaagagaatgatttatcattctttcttgctcattcggaaaacctgtaatacctgttttacctgcgacgtcaaagggcaactttttaatttcctctatattttgactcattccaccttgcacgacactccaaaagttcatcgggtaacgatttgaactttctaaaattggtttaaacttttttgtttccttaccgtccggactaataattgcacttacagtttgaggtttatatttatcacctttacttgccaaagttgctgcatattgagcgagttgaagaggggtatgcacttcatttcctccccaagaggcgtttaataaagcggagattccattttcaaacttattagatggatggaattcatattgtccgtcttcttcaaagggtaaatcaatcccggttttagaacgtaggccgaattgcattaaataatctgtccatatatgtgccactttttctatattcccattattttggttgaataggggcagagctacttttgctgtcataaatgtgttagatgaattaatgatagcctgcctcggtgtaatctcccctgttggtgttccaggcgcattcgtaatgttattttgattatcatactgaaaagtacctttatctaaataagtatcttcgggttggaaaagcttttcgtttaatccaattaaaatagtgagtggttttatagtagaagccatatttacataagattcaccatactttaatttttgaattgctttattttgcgaaagagagttaatgttttcttttctagaagatacacgtgtatttaatatatttggatcaaaaactgccgtgttggccatagttaaaattgcgccagtttttgcatcgcttactacagcataaccagctttagcatcaggtattttcttaatttgagatcttaatgcttcttctgctttttgctgcaactcagagtctaaagctagccgtacatctttacctatttgtactttttgaatgtcccataagaactttttattattcaatttaaaaataagagttttacctggttttccttttaaatcattttcatattgcagctcaatcccgctttttccaacagccatatgctttgaattaaggtcattttctacatacccaattacttgtgaaccaatttcgtgtttaggataatatcgaatccattcatctttaattattacattattgggtttgtttttgtttatgaatgcaagttcattctcagttatatgagagtataacggtatatcattcatagtctgctttttacaagattgttgtaattgagattttatgttctctgtagaaatatcatgttgaaactcgcttgaaaattgattaaaaaaagctaatgtgttcgatgtatcttgtttcgatagcttttcatcattagaagtgcaatatagagacttaactttcttatttgtagctagtattacaccattttgatcaaaaatctttcctctttcagctgaagaagttgcgatagtaattgaaatgaagttgatttttaataaaattagtaaaatcaaacctacaatagaaagaaccgcaaaaaatctccatctttttgtatgtaacatataaccctcccttatgtagcctatttcatcttatatttaattattttttttgtaaatgtggaacaactttattgtttaggttgtctattaagtattaaagcatgaagaaaggaataattagcatgaaaatttactagcaagtctatatgtaagtttaataagagtcattatacagtttagcacttctaatgcaagcggcaaaaaaatagagagaaaacaagaagggagagttattaatgccgtagctaaacgaaaaagaatggatgcttacaaggattaagcaaaaaattgaggcgatatttataaccgattagcggtatctaatatataagaaatgcttttagtatttgtagcaatttctgaaaggattaaatggaggatttatgaaagaacaaaaaggcaagaagcagaagacatatatatctattcgattaaatataatgttcctttgcatatttgtactattctcagctattattatgcagctaggaaaggtacaaatcgttgagggagaggcttataagaaccaagtggaaagtagtcaaaatgcaataactagtattccagttccacgtggacaaattttagatcgagaagggaaaacagttgttaataataaatctcttcgcacaattacgtatacaagggtgaagggaattacgagtgaagatattttaaaaacagcaaaagacttggcgaaagtacttgaaatgcctgaacaagatataaataaattaacagatatcgataaaaaagatttttggatgcagttgaattcgaaacgtgcggagacaaagattactaagaaagatatagaaaagtttaaagaaaagggtatagagggaaaagagttagataaaaaaatagaagacttaagacgaggtcgggttacagaggtagaattagcagaattaacagcacaagatttaaaggtgttagctattaaaagtaaaatgagttcaggttatcaactaacaccacaaatcattaaaaaagatgtaacagatgaagagtatgcgcggataagcgaaaatcttgcgaattttccaggagtagatgcaactgttgattgggaacgtaattatgtaaacgataatttatttcgttctgtattaggaaatattacgagtagtgaagaaggattaccgaaagaaaatttagattcttatttagtacgtggatataaccgtaatgatcgtgttggaaaaagttatattgaacaacgatatgaagatgtattacacggcacaaaagaagaagtaaaaaatattactgataaatcaggaaacattgttagcacagaaataatctctaaaggaaaaagtggtaatagtttaacattaacgattgatatggaattacaaaagaaagtggaagaaagtatagaaaaaaacttgagagcttttaagagttcagagccactgctcgatcgagcttttgttgtcatgacgaatccaaataacggacaaattttatcaatggcaggcaaaaagattgtagaaaaagaagggaaaatagaggttgaggatttggcattaggaaacatgacaacttcgtatgagctagggtcagctgtaaaaggtgctactttattaactggatatgagacaggggcaatacatccaggagatcaattttatgacgcgccgatgaaatttaaaggtacacaagctaagaaatcgtggaatgtatccggatttggtaatattaatgatttacgggctttacaagtatcttcgaatgtatacatgttccagacagctttaaaaattgcgggggtcaattacgtaccaaatggctcattggatattaaacaaggagcatttgatacgatgcgctattatttcaagcaatttggtttaggtgtcccaacaggtattgatttaccgaatgaaataattggacaaacgagaaaagtagatagtcaacctgggtttttactagatttttctatcggtcagtatgatacgtatacgccgttgcaattagcgcaatatatttcaacgattgcgaatggtggttatagaatgcaacctcaaattgtacaagaaatacgagaacaatcaataaaagaagaggttggcaaagttatacgttccatagaacctgtcgtattaaatcgaattgatatgaagaaagaacatattgatcggataaaagaagggtttagatgggtattccaagaaggtgatggaactggcgtgaaatatttcaaaaacgcgccatataaaccagcaggaaagacaggaacagcccaaactgtatatggtggagatgacccgattggtagaaatgcaaaaggagaacgtatggaatgttacaacttaacgttagttggatatgctccatatgataatccagaagtagcattttccgtagtagttccatggcttcatgatgataaaaatggaattaattctataattggaaaggaagtattagatgtatactttgatttgaaacagcaacgtatacatggtgaagctactagtacaggtagttctaagcaaaattagagtacttttctcagggaagagaccctgttcatataaagccatttataagtaaaaaaatgaaatatgaaataagagatagaggcgtcgtagctactatctcttattttgttaataactctcatactagctataatttttttagtttgtggaacaaatttggttcggtgattgtctattatgtgtacgtataaaaaggtgctaaaaatttggaaggaatgatgattttgaaaaataagaggatgctaaaaataggaatatgcgttggtatattaggtttaagtattacaagcctagaagcttttacaggaggggcactgcaagttgaagcgaaagaaaagactggacaagtgaaacataaaaatcaggcgacgcataaagagttctcacaacttgagaaaaaatttgatgctcgagtaggtgtatatgcgattgatactggtacaaatcaaacaatctcttatcgatctaacgaaagatttgccttcgcatcaacctacaaggctttagcagcaggagtattactacagcaaaactcaattgatacattaaatgaagtaatcacatttacgaaagaagacttagtggattattcacctgttacagagaaacatgtagatactggaatgaaactaggagaaattgctgaggctgctgttcgttcaagtgataatactgcagggaacattttatttaataaaataggcggacctaaaggatatgaaaaagcgcttaggcatatgggggatcggattactatgtctgatcgctttgaaacagaattaaacgaagctattccaggagacattcgtgacactagtacagcgaaagctattgctatgaatcttaaagcttttacggtcggaaatgcacttccagctgaaaaacgtaaaattcttacagagtggatgaaaggaaatgctacaggggacaaacttattcgtgcaggcgtaccaactgactgggtagttggagataaatcaggtgctggtagttacgggacaagaaatgatattgctatcgtttggcctccaaatagagcaccaattatcatcgtaattttatctagtaaagatgagaaagaggcaacctatgataatcaactcattgcagaggcaactaaagttatagttaaggctcttagataataatctctcaattctttatgtaatatcattaaaaataagaacttggaaagcgattctttttagtatgatggctgtaaattaaaatactataaaaacaacgctataaaaaagatcctagtgtgtactagtgtcttttttatgttaccgatttacttcatcttttaatcttgctatttgccatgcagtaagaccccacctcaaaattcaacgaaagaaaagaagttaggtggggccctgctgcccgtaaaagcccgattggtgagggctgattaaagtttcactttataataaccatgttttacaacttgcctagtttcttcaatagcatgtgtttcagcaatttcagcaatatcaactacaatcgtattttgtaagatattaactacacaacctgttaattgtaaggtggagttattacgatagggaaattgtacgtaggaaccaattgtaacattattttttgtctccatatgatacacctcgttgttaaaagttttcttctatgtgaagattcttgcatcatataatacacgaatgaagataaaatacaagagtgaaaagaaagaatatattgaataaattactctcgattaagcgtaatttaaatagttttcacatcataaaaacattgaaaactagagtgtttataaaacttacttattttataaaaaacttaaacaatcctacattatgtatcttgttttaataaagagaaagaatattaattaatggaatttcactttagttttaggtatattataattgactgaatgagtatattggtcagttagtgctattttgagacttgtaaagtagcactcagtatgtttatggaattgatttcatgaactacggttttgatactgtgtgataggtaagtggacggaaataatttaaactcttgggaggtggaacagccagtagtttctgtgtgcggtctattaacaataatttcatggtgtttaaatggcaaagtggataacgtatttaatagggtaacgcatgattagtagttataagaatccatacatataccgtatacccttcggattaagtataggaagttatagtttgagagaagttacatagtagggtgtaacactaagattaaagaagctgatgtaattataaaatgacaaaaagagaaaaatgtgagaaatgaggaattgagatgggaagtataaggactaaaaatgttaataaattaaaaagaatctcgcaagcaattttaattgttattggagcatttataaccgcgtatggattagaggctgtacttattcctaataatgtctcagatggtggtgtaacaggtataagtatcgttagttctcagttatttgggttgccattaggtcttttaattggatttattaatattccatttgtttggttaggttataaacaaatcggtagaggatttgcaatttattcagttattggtattgtatcacttgcaataggtactgtgattatgcataatgtgcctacaattattgaaggagatacattgctagttactgttgttggtggtgtgattattggctttggtatgggattggcacttcgtaatggtggggcgttagatggaattgatatgttagcggtattgttgtctagaagattaccgtttggcacaagtgatcttatcttgtttttaaatatgttcgtatttatttttgtgtcaacagtattcggtcttcagggtggaattttatcagcgattgcgtactttattgcttctaaagcaattcatattattgaagtaggattaagtggctctaaaacatttaaaattgttacaaaagaacctaaattaatgatagatacaatttgggaacgtcttgggagaaatgcaatctataatgaaatgtatggtggcttttcgaaagaagcttataaagaagttagctgtgttatcagtcgtttagaagagaataaaatgaaggaacttattcatgaaattgatgaaaatgcctttgtcactgtatatgatgttgcggaagtacaaggcggtaactttaaaaagcatgatatccattaaggggattaattaagttaaatattttatacatagttgattattgaaaaagataaaaaactcatcacatatagatagacaactggtatgtactaagatctacaactgcaaggtacatagaactaaaactaagatattcatgcgaactcaaaaagccgaatttccttaacttaggaatttcggctttaatgttatatgatactattagaacagaaccgggcatgttacatcaatggtagtgagtagaggattaggaaatagtatcattccgcaaagaattttgaataggccagagattgtagtcgtgcagttaaattaagctgtacgatttttttatacaaaagtgagtaaagagattttatgtattttgcaggagttaacattacaattttgttaaaaattttctacgttacataaagtaacaaaatttgaccctgattgtttgttatagtgtaaataatcaaaaaacttaaaatttgtcgagtgaaaattgtgataagtaattcatgtaaaaaacttaaaggggtgtacacatgcataaagaatatgaaattgaagaatacacggcgattgaggaacaaatacattattattgtaaatgtttattagtaagtcatcctgatcaaataataaagtatttagaaaaaaggttagaaaaatatgcagaaacattacaatatgcacatttatatcctgacacagttattttaccgttacagcaattagttattgaatattctttagatgttgctagaattcggaagtatatgaatttaaaaacgtaaagtgaaatttatagtttaaatgaaacagagtcgactttaggaaatgaaattctaatgtcgactctgtttcattgtttaatatcgttgattaaacatacatactaatcaatgaagtttgacatataattaagcaagggtaaaataaaagtgagtactcactcattttattggaaaaggaggatgaaatgtgcaacaaccttccattattttacggactgtatcaaaaagttttggaaaaaaagaagtgttacacaatctttcattgcaagttgaaaaagcagaaatttttggttttgttggaccttctggatcggggaaaacaacgctcattaaaatgattgcaggtattaatgaggcaacgaaaggtgaagtgcttgttaataatactaatatgcctaatttaaatgaaatgaaaagaattggttatatggcccaggcggatgcattatacgaagaattgtcagcatatgaaaatgcagattttatagcaacgatgtatggactaaagggaaaacgtaaaaagacaagaattgcagaggtttttgaacttgtacaattgtcacagtatatgaaaaagcaagtacaacaattttcaggcggaatgaaaaaacgcttatcattagcaatagcgctccttcacgaaccagaaatattaattttagatgagcctacagtggggatagatccgcttcttagaaaaacgatttgggaaaaattttatgatcttaaaaagaaaggcacaacgattattgtaacgacgcacattatggatgaagctgaattttgtgagcgtctagggttaattagagaagggaaactagttgcggttggaacaactgaagaattgaaaaaacgcgtttcatctggacggattgaagatgtctttttgctagaagaggtggtgccatcatgagagttactggtgtaattatacgtattattcgtcaattttttcgagataagcgttcgttagcaatgatgtttggagcgccgatgttattactttggcttttgtcactagtgtttacacagaaagactatataccgcaaattgctgttgttgatatgcccgctcaaatagtaaaagtgatgaaaaatcaagaagcgtcaatttatgaatacagtaaggaaaaggcgatttctgagttggaaaaacaaaaggtagatgcagtatttcgaatagagaatggaaaaatgaaacttctgttggaaggtagtgattcgtcaaaaaatcgtgctgtacttcaagtattgcaaaaaagcacagagaagaatgatgtatcgattatgaaacctgaagtaaattatttacatggctctaaagactttacgatgtttgatgggcttggtcctgtattaattggtttctttacatttttctttgtatttatattatcaggtgtatctttcgtaagagaacgtttaagtggtacgctagaaaggttattatccaccccagtaagaagatgggaaatagtcgcaggttatattattggttttggaatctttgcctttatacaatccattattatcgtaagcttttccgtttatattttagatttatacgtagctggctccatatggctaacgctacttattacatgtatgctctctttaactgcactaacattaggtacgtttttatcggcatacgcaaataatgaatttcaaatgattcaatttataccgcttgttattgtgccacaaatcttcttttctggattgtttccaatggaatctatgaataagtggctacaaatgttagggaaagtatttccactcacatacggcgctgacgcaatgagacaagtgatgattcggaatcaagggtttacagagattgcattagatcttactgtattattacttttttcactattatttgcagtaggaaatgtatttgctttaaagaaacatcgcaaaatataataatgacaaaaaggagctttataaatgcagaaggattggctggaggaattaatagctgcaactaatacggataaacgaaatgaacgtcaaatgcgaatattagaggcggctgttgatatgtttggagaaaaaggatacgcttcaacttcaacaagtgaaattgcaaagcgtgctggtgtagcggaaggaaccatcttccgctactataagacgaaaaaagatttattactagcggtcgtaatgccaactttaactaagttcgttgcaccatttttcgtacaaacctttgcaaaagaaatatttaaatcagagtatgaatcgtatgaaggacttttaagagttgtaattcataatagatttaaatttgctcaaaaacactttcctatgataaaaatattaattcaagaagtaccatttcaaccagaactaaaaaatgaaatacagcaattagtagaaacagaactgttttcacatttcaaaaagttgattgtgaaatttcaagaagaaggagagattattgagataccaccatcttccgtactacgtcttactttatcagctgtattaggtttattattaacacgatttttattattacctgaagaaaaatggaatgatgaagcagaaattgaaaatacgattcaatttatattgtatggattaactccacgaatttaatcgtcgaagtgtgaattacatatattactttttaagtaaaaataaatcgcctttaaaaaggcgatttattttcgttatatatttttgataaataagtacttgtttattaaaaacattctaaatcagcgtgtttctttgtctcttcttctaagacctaataatcctgctagtcctaataaaccaagccaagcccaattattatttctatcacgattatcatttaaatcatttgttgtatttacatttcgagttcttacatcattattaactctgtctaaattattgtcatttactcgagttgaaatatcagtgttattcactctattcatattatttccatcgtattcagcttgcgcagatgtacctaaaaacataatagagagtgctaaaacacttaaaatagatgataatttctttttcataacaattccctcctttcttaatcattaatttctccggagcatctgtgtattattcatttcacaatatctaaaccagtataatagggcgcacatttattgaaaatagagttgaatgattgttaatatattattggatatatatttctcataaaaataaatgaatcaaactttgcttaaaatgttaatcctagtacaatttatagtatacggactagcactaaggaggtaatgagatgcggcaatttgcaaaacctacaatcgtcgtaagtaaatgtttagaatttgatgcttgtcgatataatggagagatgattccagatgtaacaatacgaaatttgcagccatttgttacatttatacctgtttgtccagaagtggagattggattgggaactcctcgtgaaacgatacgaattgtagaagaaaatggtgagaacagacttgtgcaactgtcgacacgagaagatgtaactgaaaaaatggagcagttttcaaatgactttttacaaacgatatcggatgtggatggttttattttaaagaatcgttcaccaagttgtggtacgcgtgatgtgaaaatttattctggttttgaaaaagcgccagcaaagggaaaaggatcgggcttatttggcggagcagtagtaaaaaaattttcgcatcttcctattgaagaggaaggcagattgtcgaattttattattagagagcatttctttacaagactatttacaatcgcatattacaaaatgattaaacataataaaaatatgaaagaccttgtatcgtttcagtcggacaataaatatttatttatggcatataatcaagtgaaacaaaaggaattagggcgtataattgcaaatcacaaaaatgaaaagattgaagttgtatttgaaaactatgagaagactttatatgaattatttatgcgcaccccccgctatacatcgaatgtaaatgtatgcgagcacatttttggatactttaaaacaaagctaaaaaaacaagaaaaagatcattttatagaactgttacaaaagtatgcagaaaagaaaataccacttagtagtttacttacaattctaaaatcatgggccattcgatttgatgaaaagtatttattaagacaaacgtatttcgaaccataccctgaagcattagtagaaatttctgattcgggaaaaggtagagattattaaacaataaattacataattcgacacaaaatctcctatgttgttgtagaacaatgtaggaatttttttgtgcattagtacagaatctgttttaaaattaagttatgacagaattatagcaattgtctaactaatattcttgtcttttaagttgttatgtttgtagtagaaactcgcacgctgtcgaaactcaatattcgataaggggtgtgtagcggaatggaatttactctaactcgcgaaaaacaaatgattaaagaaatggtacgtgactttgctgaaaaggaaatcgcaccgaaagctgtatattatgacaaaactgcagagtttccatatgaaacatttcaaaaaatgggcgaactaggattattaggcatcccattcccagaagagtatggaggttcaggtggcgatactgtatcgtatgcgttagcagttgaagaaattggtcgcgcttgtggtggcactggtttaagctatgctgcaacaatttcattaggtgcttctccaatttattatttcggtacagaagaacaaaaacaaaagtatttagttccaatggcgtcaggtaaaacattaggtgccttcggattaacggagccgaatgctggatcagatgcaggtggtactcaaacgaaagcggtactagatggcgatgagtatgtaatcagtggtgagaagtgttggattacaaacgcagagtatgcaaataccattattgtaaccgctgtcaacggtgttgaagagaatggtagaaaacgcatttcagcatttatcgtacctactactagtgaaggattaacgatttctagtccttacgataaaatgggcgttcgcgcttctaatacttgtgaaatcgtacttgatggtgttcgtgtaccgaaagaaaatattcttggtgatgtaaataaaggttttaaacaatttttatatacacttgatggaggacgtatttcaatcgcagcattggcagttggtattgcgcaatcagcctttgaacgtgcattgcaatatgcgaaagaacgtcaacaatttggaaagtcaatctctaatttccaagcgattcaatttaaattagctgatatggcgactgaagtagagctagcacgcaatttagtacataaagcagcttggttaaaagataatgataaacctttcggcaaagaagcggcaatggcaaaactatttgcatcggaagcagcaagccgtattgcgaatcaagcagtacagattcatggtggatatggttatatgcgtgaatatgaagttgaacgacatattcgtgatgcgaaactattagaaattggtgaaggaacttctgaaattcaacgtctcgtaattgctagacatttaggatgtagataaaagggaggaatcactatgtttcaaaaaatattaattgcgaatcgcggggaaattgctgttcgtattatgaaaacttgtcaaaaacttggcatacgcactgttgctatttattctgaagcagatgaaaatgcccttcatgtgaagatggcaaatgaagcttacttagtaggtggaccgcgtgttcaagaaagttatttaaaccttgaaaaaattattgaaatagctaagaagacaaatgcagaagcgattcatccgggttatggtttattatcagagaatccgtcttttccggttcgttgcaaagaagaaggtatcgtatttatcggtccttcagaagaaatcattacgaagatgggaagtaaaatcgaatcacgtatcgcaatgcaagcagcagatgtcccagtagtcccaggtattactacaaatattgaaactgctgaagaagcaattgaaattgcaaaacaaattggttatccattaatgcttaaggcatccgcaggcggcggaggcattggtatgcagttgatggaaactgagcaaacgctcaccaaagcgtttgaaagtaataaaacaagagcgcaaaacttcttcggtaacggagaaatgtatttagagcgatatatagcagacgcgcatcatattgaaattcagcttttagcagatacacatggtaacacagtgtatttatgggagcgtgaatgttcggtacagcgccgaaatcaaaaagtaatcgaagaagcaccttcaccatttttagatgaaggtacacgaaaggcgatgggagaagttgctgtacaagctgccaaagcacttggctatacaaatgcaggtacagttgagtttcttgtagatgatcagaagaacttctatttcttagagatgaatacgagattacaagtagagcatccagtgacagaagaaattacgggattagaccttgtagaacaacaacttctgattgcaagtggagagaaactatcatttactcaggatgatgtaaaacgtagtggtcatgccattgaagctcgtatttatgcagaggatccgaaaacattcttcccatcacctgggaaaattacagatttaacattaccgtcaaatgtacggattgatcacttcttagaaaatcatgtaacgattacacctttctatgatccaatgattgcgaaagtcattgcacatggggagactcgtgaagaagcaatttcgaaattacatgatgctctagaagaattaaaagtagaaggtattaaaacgaacacgccaatgctactgcaagttttggaagacgaagtgttcaaagagggtatttatacaacaggctttgtaacgaaacaactcgttaaaaaataagatttaacaatattaagggggaaaaaatgatgacgaaagtatacgcatcgatggcaggaaacgtttggaagattgttgtaggagtaggagatacagtagaggaagagcaggatgtcgtcattttggaatctatgaaaatggaaattccaatcatttcagaagaagctggcacagttatgaaaattaatgtgcaagaaggcgattttgtaaatgaaggagatgtattattagaaattgaatagggagatatagggggaagcgaattgaaactacctaattttgctgtcattaaagaagtcgggccacgtgatggcttacaaaatgaaaaaaagattgttggcacaaaagataaagtaaaatggattcaactacttacagaagcaggattgtcgtatgttgaagtttcctcattcgttcacccaaaatgggtccctgcattagcggatgcaaatgatgtattttctgagctaaaaagggatccaaatgttacatatgctgcgcttgttccgaatcaaaatggtttggaacgagcttttttgcaaaatgtagatgaggtgaatgtttttttatcagcaagtgaatctcataataaaagtaatattaataaatcgattaaagaagcattagttgtaattgaagatataacaaaacaggcattattcgaagggaaaaaggtaagaggctatgtttctactgtatttggatgtccttatgaaggggatataagtgtcgcagcagttgacgaattatgtaatcaactattttcatacggcatttatgaagtttctcttggggatacaatcggtgtagcgaatccattacaagtagaacaagtattagaacatctattaaagaagtatgatgcttcgcagtttgccatgcattttcataatacgtatggaatggctctagcgaatgtagttaaatcattagaatacggtattacaacgtttgatagttcttgtggtggactcgggggctgcccttatgcaccaggagcatcaggtaatgttgccactgatgacctagtacatatgctccataaattaggagtccaaacgaatatagacgaagaaaagttattgagagctagtcaatttattcaaagtaagttgaatatccaattaccgagtcatgtgtatagagcgcttcaacataaaacgataagtaggtgagaagatgctacaattacaaaacatttcagttgattatgtaacacctcacgtagtaaagatttcgttaaatcgtgcaagacaagcaaactcattatctttggcattattagatgaactacaaacgatattaactcaaataagtgaagattcaaacgtacgtgtagttattttgactggtgctggtgaaaaagcattttgtgctggtgcagatttaaaagagcgtgccggtatgaatgaagaacaagttcgccatgctgttagtatgattcgcactactatggagatggttgaacaattaccacagccagttattgctgctataaatggaattgcacttggtggtggtacggaattaagtttagcttgtgattttagaattgctgctgaatctgcaagtcttggtcttactgaaacgacacttgcaattataccaggagcaggtggtacacagcgcttaccgagattaattggtgttggtagagcgaaagaattaatttatacaggtagacgtatttcagcgcaagaagcaaaagaatacggtttagtagaatttgttgtaccagctaatttacttgaagagaaagcgattgaaatagcagagaaaattgctagtaatggacctattgctgttcgattagcaaaagaggcaatttcaaatggtattcaagttgatttacataccggattacaaatggaaaaacaagcgtatgaaggtgtaatccatacgaaagatcgaatagaaggattacaggcattcaaagaaaaacgcaaaccgatgtataagggggagtaaatatgttagaccaaaaacaacaatctaattcatttgaagaacgagttgaaacaattaaacaaggcggggcaccgaaatatcatgagcaaaataaagcaaaaggaaaattattcgttcgagaccgtttagcgcttctatttgataatggcgaatatgtagaagatgcattatttgctaactgtgaacaaacaggcttacctgcggatggcgttgtaacggcaacgggtaaaatacatggtcgtactgcgtgtgtaatggccaatgattctactgtaaaagctggatcatggggatcacgcacagttgaaaagattttacgtattcaagaaacagctgaaaaactacgtgttccgttattttatttagtcgactctgctggagcgcgtattacagatcaagtagaaatgttcccagggcgccgcggtgcaggaagaatcttctataatcaagtgaagttatcaggtaaagttcctcaagtatgcttgttatttggaccttctgcagctggtggtgcgtatattccagccttttgtgacgttgtaatgatggtagagggaaatgcatctatgtatttaggatctcctcgtatggctgagatggttatcggtgagaaggtaactttagaagagatgggcggagctcgtatgcattgctctgtatcaggatgcggagatgttttatgtaagacagaagaagatgcgattacacaagcaagacaatacatttcatattttccaaacaactatttagaaaagactccattggttacacctcaagaaccgaaacaattcgataaaacgttagaacaaatcattccagaaaatcaaaatgctcctttcaatatgaaagatctcattaatagagttattgatgagggttcattctatgaagtaaaaaaattatttgctcaagagctaattacaggcttagcacgtattgatggtaagccagttggtattattgcaaatcagccgcgtatgaagggtggcgtattattccacgattcagctgataaagctgctaagtttattaatttatgcgatgcatatcatattccattattattccttgcggatgtaccaggatttatgatcggtacaaaagtagagcgtgccggtattattcgccacggtgcaaaaatgatttctgcaatgagtgaagcaactgtaccgaagatttctatcgttgttcgtaaagcatatggcgctggtttatatgcgatggcaggtccggcatttgaaccagattgctgtctggcattaccgacagcctctattgcggtaatgggtccagaagctgcggttaatgctgtatatgcaaataaaattgcagctttaccagaagaagagcgtgctagcttcattgctgaaaaacgtgaagagtataagaaagatattgatatttatcatttagcatcagagatggtgattgatggtattgttcatccaaacaatttacgtgaagagttaaaaggacgtttcgaaatgtatatgagtaaatatcaagtattcacggatcgtaaacatcctgtatatccagtttaaaagccctatttagggctttcttgctcaaaaagttaaggaggggaaaacattgaaacaagcagtttggtttccaacagaagagtacaaggaaaaaacacgtttatatggttggatgaaatcattgggatatgaagattatgaaactttttataataaatctattgaggaaacagcttggttttggggagaggcagaaaaagcagttggctatcaatggatgaaaccttatacagaagtattagatttagaaaatggtacaccgtttgcacagtggtataatggtggaacatgtaacgttgtagaatcagctttatcccgctggcttgcggatgaagagacgagaatacagccagcacttcagtatgaaggggaaaatggaacttcaaaatcatttacatatgaagagcttgataactgggtaagccgtgttgccaatggtttgaaacacgcgggtattgaaaaaggtgaccgtgtaacaatttatatgccaatgattccagaaacagttgttgcgatgctagctgtaatgaaaattggagcaattatttcaccaatattctcaggctttgcgtctgatgcagttatgacacgtgtgcaagcggcaggttcaaaaatgattattaccgcagatggattttcacgccgaggtaaaattgtttctttaaaagatgaagtagataaagcttgtgaacattgcccaactgttgaaaaagtggtaatcgttcgtcatgcaggaaatgattttacaccacataactatgacttttcgtggagtacgctagaaaaagaaaaaccattcatacatgccgaagaaatgcaaagcgatgatccattaatgctcatttatacatcaggaacgactggtaagccgaaaggaacagtacacacgcatgcaggatttcctttgaaagcagcctttgatgcaggatttggaatgaatattaaacaaggtgatcgtgtattatgggtaactgatatgggctggatgatggggccatttctattattcggttcactcattaatggagcaacgatggttatgtacgaaggtgttccagacttcccagaagcagaccggttatgggagacagttgataaatatgaaattactcatctaggtatttcgccaacgttaatccgagcattaatggcaaaaggtgatgagtatgtcaataaacattctttaaagagtttggaagtattcgcatcaacaggagaaccttggaatcctgatccatggatgtggctgtttgaaacagttggaaaaggaaatgttccaatctgtaactactcaggtggaactgaaatctctggtgggattttcggtaatgttcttattaagccaatcgcaccgattagttttaacgcatctttaccaggaatggcagctgtcgtactggatgatcaaggtaaaccaattcgagatgaagtcggagaattatgcttagagaaaccttgggtaggtatgacgaaaagcttctgggaagatgatgaacgttacgtgaacacatattggtcacgttttgaaaataaatgggtccacggtgactgggtcatttacgatggtgaacaatatatcatcacagggcgttcagacgatacgttaaatattgcaggtaaacgtattggacctgctgaatatgaatctattcttgtgaaacataacgatgtaattgaagctgctgcaattggtgtacctgacgaagtaaaaggtgaagtttgtcattgttttgtagtattaagagatcatgtaacattcacaggagaattaaagaaagaattaatgagtttagtaaactctcatattggaaaagcgttgtgtcctaaagatatccacgttgtagaagatttaccgaaaacacgtaactctaaagtaatgcgccgtgttattaaagcagcttacttaggaaaagagttaggtgatttatcatcgcttgtaaatcctgaagtagttccgtttattcaggggttacagtctagtaaattataaagttagaaaggatctctgtataaatagagatccttttttatgtttataaaaagaaaagaagtgaatttgatgaagaagaaaaattctactattagtgttaagtatgtctgttttatagtttttattaaaatacgatactgtggcatgtttattcattggagtaattaaattttgttaaggatgaaattcaataaaagcgttattttaataggctgttacgaaatttaatttgaaaggcacatccaaatgataaaaaaagagcactataaaatcagtgctctttttattagaaattgcttagttcttaaaaataaaatcattacggacaattcacaatggtaataatgacgctagccattgttccaggagaatcaagaagtgaagcagtaacggttactgttccaggcccattagcggctagaaatacagcggtaaagttacctgaggcattggtaatgacagcaagaggaaccatgaaagcaagagatgggttactaaacgaaaaactgaccactacccctggagtaggaataccgtttactaatacttgacccgaaaaaaataaagtattatttccttgagtggatacacatgctgtggtttcgttagaagtcaaggtaatagatgcaggtccagcaggaagattaaatccagttggtccagttggtccagttgatccagttgatccggttggtccagttgatccagttgatccagttgatccagttgatccagttggtccggttgatccggttgatccggttggcccagtcggtccagttgatccggttaatccagtagctcctgtagaaccggtgggaccggtagggaattgaaaaggttgaacagttggaagtgtaggtccaatagaaccgggattaagtgcagcaaaagataaaaactcgtccattatttatcacctctaaaaatcgtattactaatagtaaatgtaatgatagagcaaagtgaaacggacaagcggttttattttaacaaattaaacaaagtagttatatgatagaaagagagattagtatgattcctttagaaattaaatataaaaaggcgattatcttcaaatcgccttttaggtaatgccgtgtaattttattcagttatttgaaatatagtttcattcggtttggaaaatccatacagtttccttgcgaattttaaaatttcttcttcactacttgttaaagccttgacatccttgttaagggaatgaccatccttctttacagaagataatttttgttgttccgtattaagtgtgatttgtttttctttaatcatttcttgttggttattcagagaatattgaaggacaaaaattataggtaatataaaagccaaagtagttataatacggcgtcttgttttttttatactaccttgttgggtattaggattcacttgctgtgagggtatattaggatttgattggtgtgatgatacttttgggatgtttcccattaaaatgcctccattactgattgtcgaatttaaaccgtttaatagtattataaatgttcaataaggattttagaagatattttaatataggtgagttttgtaaagtttaaacaaaatctttatttaaataaaagaaaccccgcttgtctctggggtttctgaaggcaatgaaagtactcgactaattaaagattccatgaattttttgctgaaaatactggtgaattcgtctgaagtaatgagggcatctaaagctttatacgtacgtgaagtaattaaaaatcgatttataagagttagcttgttttttcttaatagcccacctaatcagtaaagacatatgtctgttgaaatctttacgtgttcattgataaaaagctgattatattcagtcagctttttgtataatacattctagtatttatcggttccaaaagacatattctttcctttaagttggcatcgaaaatattaccaatttttccttttacaatggcaacaaataaagaaacatttacaacgacacttatttcgtttagaactccaatcatcatcacgatgacacttttctttagatttccaccaatcatcattacaatgtttttcctgagaactccaatcgtcatcacaatgacacttttctttagatttccaccaatcatcattacaatgctttttctgagaactccaattatcatcacaatgatgcttttctttagatttccaccaatcatcacaacaatgctttttctgagaactccagcaatcatttttccaggacatttatttctacctcctcgtatgataaagttaggttttttaggaaagggatttacctataaacccgtgattcatttcaattaatggaaaaccgtagagtttctatccttaagttgatgggcatgtaaggtgacccctattagtggtcaaaattttaaaaaaacaaggaggctgtccagacagccccctcgtttttttcgatattctaataaattgcatatacacttacattgaatgggtctgcagcgtttctaggattagcgatataaagtgatctcgctgattctacagttgttctattaccattcaatacagcggaaaaaatgataggatccgtaccactagatacatccttcataacattaaaactaataatatctgggtttcctccatcagttattacccattttaaatattgtgttccaactggaagagattccgtactaaaatttccacttgaacgattgctttgtccttctaaaggagacgtttgtgataaaacagttgcaattaattgttccggcatattaattcctcttttcttaataaatttatattaattttttataacaatgattcaactcaaatatatgaaggattaaataaaataagtattgagaaatattttgtattagggaatcgttttaaaaatgggcttaacgttgtaaatccgcattttcctaacgctccccctaggggaagcgttaggaaccgtgccgtgaagtgtaaagtaatttacagaaaatgtaatacgtgatgcatcgacagttgcaaaaattaacatttatgcaacactccacttgggcttgatttttatggcgccataacgttgcatatattgtgttgcaaattaattttcgataatacggtgatatttgtagcgaaatagaaaatagatatttgcagcactatgaataccttaacgtgctgcaaaatgattacaaaaaacctttttaaaaagtgcaccgtacactttttatccttttactggaatctactttgcacttcccagcacaggtgccccttctagcccttgaaagatcttcaatatatacaaggacacctcgctcaaattgaacgggtaaagaaagcatatcaagagagcaaagtgacctattaactaacgaaagcgtcacttccatttgctcgtttattaaggttattagtatcaatttggccaaacattattccaaagctacattaataaaacacacggcaagcttatgggttaataattaacacacggtcaatttatgcttccgattcggttgaataattagatgattatctacaaaaataagtgttttctggccaacttatgcttccaactgcggccaacttataggtaaaatgacattgtatgatatgaaccataactttgccaggttggcgaggttatggttcttttttgtttctggaaaggttatagttctaaaaatagaatgtatctaattctttggttctttcacttacatcctcaatgtatcttgtgtgttatcccttaatgatcacaattttatcccgtcaaagcccgattggtgaggactgataattagtggggatgaacatctctgtttgattaattaatacttcattttatttgaatctccatatgttttgtgtttttatccatacctattgtaagattatatagagttctcctaataaactgttttaatggattatttaggggttttaaatttataaatcttaaattgttttttcgggataattttttatctaaataatttatattgaagtagaggtgaaccatcggtgaagcaggtgttggtgattaaaaatgaacggtcttcagcaaagaaaatcgtaagcggtttaacgcaagagggccatttcattttaaaacttcacaatgaaaaccaaggtttaaatatagcatatgagcaagattgggatattatcatattggattgggattcattaagtatatcgggaccagaaatttgtagacaaatacgacttgttaaaacgacaccaatcattattgtgaccaacaatatttctagcgaggattgcatagcagggttacaagcaggagcagatgattatattagaaaaccatttgtgaaggaagaattagtagcgagagttcaagctattttaagaagaagtgactataaccagcaaaatgagacaaacttttttcagtttaaagatctctttgttgatgcatctagcaatattgtgaaaaaaggtggcaaaaatctctcgcttacgaagcgcgagtacgatttacttgtatttttaattaagaataaaaatacgatattaagccgtgaaatgcttttgaatcaagtttggggatatgacgtagtagtaaatccgaatgtagtagacttatatattgggtatgtaagaaaaaagctaaagtgcgagaagaaagatagatatattcaaacgatacatggcagaggctattcaatggttgaatgataaaaataagataataaagtagtttctgtgaaatattagttattactgcgcgtattttgtaagggaaggtctctgtcccgtattcgttgagaaagtatttaatgaaggctaatcaacagtcctgaccgcacatattactttttatgcttgattttatgaattgatacgattcacaagattttcacagaattaatgactatactaattaacaggatgttcaaatgaaaatgattatcaatagcgattcaattgaataaaagttactttctaattcaatctatggatgtcatcattttcgaaataaatcacactataaggagtatacatatgaaaaaatctatgcttttaaaattagtgagtattctagcaatttttactttaatgttagtggcttgctcagattcaagtaaagaaacttcgaaggctaataataaagataatggtagtgataagccaaaaacggttgaaatcactgatgctcatggaactgttaaagtacctgtaaacccaaagaatgtagttgctttggataacagaacttttgaaactttatctgattggggaattaaattagcggctgctccaaaggatatcatgcctgctgattcagcatataaaaaggatgaaaaagttcaaaatattgggaatcaccgtgaaccaaatctagaaattattgcagcggcaaaccctgatcttgtaatcgttggtcaaagatttgctgatcattatgaagaaatcaaaaaattagtgccaaatgcagctgttattgatcttaattttgatgtttctgagaaggctactaagcctggagaaaacttagtaaaaggacttaaagattctacaactactttaggtaaaatctttgctaaagataaagaagctaaacaattagtagctgatttcgataaatctattgaaaaggcaaaatctgcttataacggaaaagataaagttatgagtgttatcgttactggtggaaatattggctttgctgcgccgcactctggtcgcgtttggggacctatgtatgaaattttcggttggactccagcattagaagtttcgaattctactgcaggtcataaaggtgatgatgtttctgttgaagctatcgcacaaacaaatcctgattggcttttcgtattagatcgtgatgctgcaacatctgatgcagctaagtcaacacctgctaaggatgttatttctaaatcaccagctcttcaaaacacaactgctgtttctaaacaacaagttgtttatgcaccagaagatacttacacaaatgaatcaattcaaacttatatagagttatttggaaatcttgcaaaaactttagctaagtagtgtaaaggggtacgaaacagtgtcaaaaaatatgatttctagggttgagaatatttctcaaccccagttttataatcacaataaaatatggacaaaaccttttataatagcggttatagttgttataattttagggattatatcactgtttactggagtttatgatatacgtggacaagaggacggaatggagatgtttttcatcactcgtgttccgagaacagttgcattaatgcttactggagctgcaatggcgatggcaggactcgtaatgcaattaattacacagaatcgttttgttgaacctactacaacggggacgattgaatggtcaggcttaggcctgctttttgtgtatttattatttcctgccccaactttagttcaaagaatgactggtgcaatcattttttcttttataggaactatgattttctttctatttttaagaagagttaagcttcgttcgtctttaattgttccgattatcggattgatgcttggagcagtaatttctgcagtgtccacttttttaggactcctttttcaaaagacgcaaagtattgaaacttggtttgtaggttcatttgctaacattcaggtgggaagatatgaatatttatggctgattgttatcattacttttcttatttttatgtatgctaatagattgactttagctggactaggagaagatgtcgcaacaagtcttggagttaattacaatagaattgttctttttgggactgctcttatctctgttgcagttggaattgttgcagctgttattggacacttacctttcttaggattaattgtgccaaatatcgtttcaatgtttagaggtgatgatcttaggagtaatttaccttgggtttgtgtgatcggaatgggatcaataactgcctgtgacatcatttctcgaacaattatacagccttttgaattacctgtttctttaatacttgcaacagtgggagcagtcgtgtttattactattttattgagacaaagaaaaccaaggaggctacgatgatcacattagaatatagaaaaaaagaaaatgtcgaaatcgattctagccttcataatgaaagtagatcagctagcgcttttcggtctaagaaggaagcaagacgttattggattttactcataacattgattgctttaggtcttctttcttcatatggacttttagtttataacaatccagttccgatagattcaccttcttttatcccagtcgttaagagaaggatagtagctattgttgcaatgattattgctgcggtttgccatagcttgtcgacagttgctttccaatctattacgaataataaaattattactccttcacttttaggtttcgaatcactttattcagcaattcaaacgagtacagtattcttctttggtgctagtgcgttaataaattttaatggaattggatcatttttattccaagttgttgttatggtcttcatgagtttgatactttatggatggttactttccggtaaatacgggaatttacaacttatgcttttagttggaattattattggtaccgggctaaattctgtgtcaactttcatgagaaaactacttgcgccttcagaatttgatattttacaagcaagattatttggttctgttaatcatgcagatcctgcatattttcctattgtaattccgatgatcataattgtagcagtattaatttttgctcattctaagaatttgaatgttttgtcactaggaaaggatgttgctacttcttttggagttaaatatcaacctagtgtaatttatacacttgtattagttgctattctgatgtccatttcaaccgctctaattgggccacttactttctacggctttttagtagcaactttgagttatcaggcggcgtcaacttatgatcatagatatattttcccaatggcttttgctataggatttttaataatgacgagcgcatactttttaatgtatcatgtattccatgctcaaggtgtagtttcagttattattgaattatttggtggaattatattcttaactatagttttaaggaagagggctttatgataaaaattgataatgttaaaaagttctatactgataaggtaaaaataggacctttggatattgaaataccaaaagcgggctttacttctttaattgggccaaatggtgctggaaagtccacgacacttttgatgattggtagacttttagatatggatgaaggccaaattcaggtagcaaatatggatgtttctgaatccaaatcaaaagacttagcaaaagttttgactatattgcgacaagaaaatcattttgtaactaggcttacagttagacaattagttggatttgggcgctttccttattcaaagggaagattgactaaagaagatgaggttatcatttctaaatatatcgatttcttagatttaactagtttagagaatagatatttagatgagctttctggtggtcaaagacaaagggcatatgtagcgatggtattgtgccaagagacggaatatgtacttttggacgaacctctgaacaaccttgatgttgctcgttctgttcaaatgatggagcatttaagacgtgcagctaatgaatttggaagaacaattttgactgttatgcatgacataaattttgcagctaaatactcggataaaatttgtgctatgaaagatggacaaattgctgcttttggaacagtagaagaggttatggactcaacacttttgacagatatttttgaaacaaaaatagaaattattaatggtccttatgggccaatcgcagtttattagttataaaatgtgaaaaaataccgtagcttgtgtagattatgcaagctactctagttgaagttgctgtctgtattttataggcagcagcttttttatgtgactactcataaaatgcaaaagaatgcttcaccttttcaagtatgtactaaacgaaaaaaatatccctgtataactttttaaaagaattcagcttgttttttgatatgtaatattgcatatcagagtgtattgataaaagtgtaaggggtcactataatgagggcataaagataaatcacattttcgtagcaataaaaaggaggaaataatatggaaatcgcaatgacagttttaaaatttgtaggtggcgtaatcccgttaattcaagaacttttaaaagcatttatgtaagtttattagttagctatcatttatcgatcattatcatattttactaaaaaagaacggggtgatttttctgaatattaagaaaaacactaaaagaagaaagttccttgcatgtttattagttagtttatgcactattaattattcatctatttccttcgcagaaacacaagcaagtaatgcaactgatgtaaccaaaaatgctagtggcattgatactggtatagcaaatcttaaatataataatcaagaggttttagctgtaaatggtgataaagtagaaagttttgttccgaaagaaagtatcaattcaaatggtaaatttgtagtagtggaacgcgagaaaaaatcacttacaacgtcaccagtcgatatttcaattattgattctgtagtgaatcgcacgtatccaggagctgtacaacttgcaaataaagcttttgcagacaatcaaccaagtttattagtggctaagagaaagcctttgaatattagtatagacttaccgggcatgagaaaagaaaatacaatcactgtccaaaatccgacatatggtaatgtagctggagcagtagacgatttagtatctacttggaatgaaaagtattctacaacacatacgttacctgcaagaatgcagtatacggaatctatggtttatagtaaatcacaaatagcaagtgctcttaatgttaacgctaaatatcttgataacagtctaaacattgattttaatgcggttgcaaatggagagaaaaaagtgatggtagcggcgtataagcaaatattttatacggtaagtgctgaactacctaacaatccatccgacctttttgataatagcgttacttttgacgagttaactcgaaaaggcgtaagtaattcggctccacctgttatggtttcaaatgtagcttatggtagaacgatttatgtaaaattagaaacaacatctaagagcaaagatgtacaagctgcttttaaagccttacttaagaataacagcgttgaaacaagtggacagtataaagatatttttgaagaaagtacctttactgctgtagtattaggcggagatgcgaaagagcataacaaggttgttactaaagatttcaatgaaatccgaaatatcattaaagataatgctgaattaagtcttaaaaatccagcatacccaatttcatatacaagcactttcttaaaagataattcaactgctgctgttcataacaatacagattatattgagacgacaactacagaatattcaagtgctaaaatgacacttgatcattacggtgcttacgttgctcaatttgatgtatcttgggatgaattcacatttgaccaaaagggtaacgaagtactaacacataaaacgtgggatggtagcggaaaagacaaaacggctcattactctacagttatcccactcccaccaaattcaaaaaatataaaaattgtagcaagagaatgtacaggtcttgcatgggaatggtggagaacaattattaatgaacaaaatgttccattaacaaatgaaataaaagtttcaattggaggaacaacattatacccaacagctagtattagtcattaagtataaaacaagcgccctataagtagggcgctttttacttggtcacaaattttattttgtatcggtatgtttttaagttttgtaaatcatcaactataaggtgggaatattgtgcagacgaaaagctacatgtttttcgtctttttgttctcttgcttaataagaaagatcctgtaactcagtacaggatctttaatcaaacgtttttaaaagctaaattgtggtttcatatcacctttataaggttcatgttcaacgaatatagttatatccttaccagcttggtctttaccagttctcttatacgtaaatttattcttatttagttcagtaagttcaagagcagcaccgtatttgttatttccaattgaaacatgggctcttattttattttcgtgtacaacatcgaagtagccataatcaccgcggctttgacctgtttcgctattgaagaactcatatttattagatttgtcatcaaattttgctagacttataaaattcgaattaaactgtgttacatcgttaccagtttcgtctaatacctttgttccgtgccaaagggtaccgcctaaaattttatctccatcaacgtttttaacaatatctcctgtagtcgtgttcagctgcttgtccggatcagtgaaagaaagttctttttctttatatggaacatgttcaacgaaaacttctacatctttaccgttagcgtctttccctattcgtttataagtaaatacatttttatttagttttgtcatgtcaacgacagcttgatacttcattgattctgaaattaatattctctttttcccatcatttgtgataaagaaagttcctttatcgccacgacttgcacctgttttagcatcaaaaaattcatatctgccggacttcgcatcatattttgcaagaccaatgaagtttgcattctcttttgttaagtcattcttatctttgtcatacactcgtgtaccttgccaatttgtctcgctaagaatattagccattttttgccctttagttaatttattttccttttttgtttctttagcaacttgttcttgcttttgtttcccatgattttcttcagctttagtaccagcacaccctgttaatgctaatgtgaatccgagcagtacggatgatagtgcttttgtttttttgttcatgttttatcgtctccttattttatgatttcaagtagtacggttagcgattatagtagcagtgcgtcatatataaacttaattgctacgtttcttatgttaatccccgactataaactgcctctaaataaaacattaaaaaaagataaactaattcctaaatttttttcatacttataaaaaggtcttttacatggggggaatgtaaatttcttattttgaaaatggcgtaatcacattggggtatacacattatgcttacattgcgattttagatgtgatgttatactgtgtataagattttatgtgtgtatgttgtgtcggtttttgtcggtaagttgatatatttcgaaaatcgctgatatatttggagttgcgccgatatatttcgaaaatcgccgatatatttggagttgtgctgatatatttgaaaaatcgctgatatattttggagggggataaaaatgattgtgaaagagcggaaaatgcccgtatatttgctgcaattagaagctttacttagaagattgcctgctcatcatccaaaaaggaatgtggtggttgaaagtctagcgaaatttatggccggctataaaggagagcaggcgattgagtatccgctgagttttctatccgaagcagaataccatattttacatgatattaggttatttgatcaaaaacattatttccaaattgataccctcatagtttcatcttattttcttcttttttttgaaataaaaaatattattggtacattaatttttgatacaaagttcaatcaacttattcgaatagtagatggtaatacggaagaaggattcccagatccgcttttacaactgaaacggcaagagatgcaactgagaaaatggctgaatctacatgatttacataatattccgattgaagccctcgttgtaattagttcccctcgtacaattattaaaacttcagatgaaatactgtctagtaaaattatccacagtgcaaatttacctaatagaataaaacagattaaaaatcaatataaagaaaaagtgattgataatataaatggacttataggccagattatgaatgagcacattccgcaacgtcaaaatgttcttgcgcaatataaaattaaaaaagaggaattgctaaagggtgtacagtgtgaggaatgttttacaatggcaatgttaaaagaaagacagggatggcgttgttcaaattgcaatagtatgtctaaacatgctcatttacgtgctgtacaagattacacacttctgtttagtgtgataactactaatagcgaattgagggaatttcttaatatggaatctagttctgcggttaaaagactcctccaaacaatgaacatcaccttcactggcaataacaaaggacgaatatatgatttaacttctttccaatcgtaattttgctataataaataagtacttatacgaaggggagtctaaagagagtatgaagtcatttaatatcgatcatgttatagctagtgttttgcaatggatattaaatatagccttaattatattatccattgtgttatcaattttcttagtgaatgagacaattacgttcgtgcagtatattttttcggcaaaagagtatacgtcttataaattggttgaaagtatcatcgtctatttcttatacttcgagttcattgcattaattattaagtattttaaatcgaactatcatttcccgttacgttattttatttatatcggaattacggccttaattcgattaattattgtgtctcatgaggaaccgatggagacgttattatacgcaggagcaattcttgttttagttattgctttatacatatcaaatatgagagatttgagaaaagagtagtagtgcagacataagtcagcactacttttttacatcttgaccttcaagttgcttgaaagtttacaatgaaattagggcgtttgaaatcgaaaaaaattgagaaattaagtgaagaggtttcttttacttggaggttataggaatgaatcaggaattgaagttacgtccattagaacgagaagatttaaagtttgtacacgaactgaataataatgcgcatattatgtcgtattggtttgaagagccgtatgaggcatttgtggagctgcaagacttatatgataaacatatacatgatcaaagcgaacgccgatttatcgttgagaaagacaatgaaatggttggattagttgagttagtagaaatcgattatattcaccgtagaacagaattccaaattattattgatccgaattatcaaggatatggttatgcagtggatgcgacgcgtttagcaatggattacgctttttccgtactaaatatgcataagatttatttagttgtggataaggaaaatgaaaaggcagtacatgtttataaaaaagttgggtttatggtagaaggtgagcttatcgatgagtttttcgttgatggtaactatcataatgcgataagaatgtgtatgtttcagaagcaatattttgaaaacaagtagttgaaagattcggaagtaatgttgacgcttcgtaaaaccgtatgctaaaatcctttttaagtattaaggaaggtgcataatatgctttatataaaatttgtaaaactcattagaaaactttgctccgcacaaatgtatacggtgaagcgttgtacggagcttaatcaaggggtataaatcccctatattcatcggctgaataacttttctaaaaaagtatagtgtatctatgcttatttcgttatggtttttcagctggtgtataaaatagattaaggggccatagacaatgctttgtctatggccctttgtgtatattattccgatgagtctttactataaattggagtagtataggaaaaaccacgaagcagagggctagtgtcgaatgacgctatctctctgctttttttaatttcaggaaaagaggaataaaaatgagtttacttaaagtggaaagtttatcacatagttttatagataaagtattatacgaaaatgcttcttttgatttgcataaaggggagcatatgggaattgttggacagaatggtgcaggaaaaagcacattaatgaaaatattggtgggggaaattattcctgataagggagacataaagtggcaacctaatattcaaattggacatcttgatcaatacgcagaaattgatgaggtttataccatttcacaatatttaaagagagccttttatgatttgtatgcaatggaaaagagaatgaacaagttatatgaagaaagtgcgatgactggagatgaaaatcaactattgaaagcggcagaaattcaaggactgctcgaggctcgtgatttttattcagtagatagtattacgaataaggtggcagccggtttaggtattgatgtgattgggatgaatcgtgtgattggtgaattaagcggagggcagcgtgcaaaggtaattttagcgaagctcttattagaagagcctaatattttattgctagatgaaccgacgaattttctcgataaggagcatgtggagtggcttgctaattatttaatgaattttgaaggagcgtttattgtcgtatcacatgattttgattttctggaaaaggtaacttcttgcatatgtgatgtagagttcggaacagttaagaagtattacggcaaatactcagattttgtaagacaaaaggagcatttgcgaaaagattatattcgccaatattatgcacagcaaaagaaaattgaaaaaacggaagagtatattcgtagaaatattgctggggtgaattcaaaaatagcgcaaggtcgtagaaaacaattacagcgtatggaaagaattgcgccaccaagttttactcataaaccgtctattcattttcaggaacttcccatttcagttcagacagttcttgaagtaaataatcttgaagttggttacgacttcgctctcttaccaaagttgaatttttcagtaatgggtgggcaaaaacttgtcattacaggtttcaatggagtagggaaatctactttattaaaaacaatcgttggaaatattgctagtatttctggagagtttcacttttcagagcaaataaagattggatattatgagcaagatttaaattggagcaatgattctttaacgccgcttcaaattatttcagaacagtttcctaaactgaatatgaaggaaatacgccatcatttagctgcgtgtggagtgaaggatacgcacgtttcgcaagaaattcgtacgttaagtggtggtgaacaatcgaaggtgaaactgtgtggattattactatcaccttgtaacttcttaattttagatgagccgacaaatcatttggatgcagaagcgaaggaagctttgcaaaaggcgttaattaagtttaagggcagcattatactcgtatctcacgaagcaagtttttatcttgattgggcagatagcatctttcatatagagacgggattagttaagggggtgtgaaacatatgagtgaaaacaattggaaaacgaaaattatattatttttgaccgctcaaactatttcgttgttcggttcctctctcgtgcaatacgcgattatatggtatatcacccttacaacatcatcaggagtgatgttgactatttcaactgtttgcggttttctaccacaaattgcgatatctttgtttgcaggtgtttggattgatcgttatgaccgtaaaaagatgattatgttatcggatggaattatagcgattgcgacgttagtcttagcaattttatttttaacaggatataaaagtatttggttactttttattgtgttactcattcgttcagctggaacaggagtacaaacgccagctgtgaatgcattaattccgcaaatcgttccgaaagagtatcttatgaaagtaaatggaataaatagcagtattacatctttaattatgtttctttctccagcagcaagtgctgcgattctttctattgccagcattgaaacaacattttttattgatgttattacagctatgattggaattagtattatgtttgtcattcatgtggaaggacatgtgaatgtagaaagtaagcaaaaatctaatctacaaggaattaaagaagggttcacttatttaaaagaaaatgtatttattaaaaggctaatcgttttattgattatcgtcatgattttaataagtccagctgcttttttaacacctttaatggtaactcgttctttcggggccgaaatgtggagacttactgctagtgagatgacctttagtgcgggtgcggcagctggtggcgtattgattgcagcgtggggtggttttcgtaatcgtatgcatacaacagcgctagcttgtgcattatatggactgcttatgattggactcggaatagcaccgatatttattatgtatttagtctttaattttttaattggtataacaatgccgtgcttcaatacaccagttactgtgttattgcaggagaaagtagaaccatcaatgcacggacggatgtttagccttgtacaaattgcgaattcatgcgcgcttcctttaggaatgataatatttggtccgttgtcggatatgtttagtgtagagattttgttaatttatgctgggatattcgtgctattttgcgcaatgtatattgtattaagcaagaggtttgaagtgtaaatatttataatttagaaggtttgcgaagtgatttaagatgctttgcaaacctttttgttgtttgttcagtcaataattatttattgtttaacaataaataattattgactgttaattcttttttagataatatgatggtaagaatctaaggggaattacataagtagaggagaatgtgaaatgaaaaataaatacgtagtagctatttctttcatgattttagcgattatttctttaacgatacatgcttcaaacagtaaagtaggagcggatggatttcttgaagaacctttctttttcctagtaccgataagttatatattgttccttagtggtattggtatattgctatttggatttattacttcaaagctgaaaaagggcaatagatagggacaaaacactcactatgaaatagaaacataccatatggaagaaaaagaataagtgagatgaatcatgatgaatcattatttttataatggtagacaagtaggagctgctattacgctggctggggcacaagggacaattcatgctgtgaatcaagctattcaaatgcagcaacaagcatattttgcacaaatgatgcaaattcagtatatgccgtattcacaacttccgatgcaaattatacattacgatgtacatccagctggtttattttccattccatatggcgggacatatttcttatgaaagaaagcgactcaatagagtcgcttttttatattccgcctaacttcattccaaggaaggcaaaggcgataccaattatgtaagtagcacttaaatataaaaggaagatgtatagttttttacgattgagaagctgaacagattctaatttaaacgtagaaaatgtagtgaatgcgcccataaatccagtacctaataatagttgccagcctgtagtgactccgttgccaattatatacccaagtaaaaatgcccctgttatattaataaggaatgtagcaattggaaattgtgttttatttcttttcttaaaccaattgctaattgcaaatcgtgtaatcgcaccgaaaaatcctcctgttgcgactaataaagcttctatcatgagtaatcaccttctgtaagagatttcttaattaagaaatctccaagtgtatagccaaggccagacataatgaggccaccaagtatgctgcatgatacatataagaaggctatgctccactcagaatgattgatcaattgcacagtttctacactaaatgttgaaaaagtcgtaaaggaaccgatgaatccagttccgatgcctgtgataacctctgaaggtaagatgtttagccgagcgatataagtagttagccacgctaagaaaaagcaaccgattaagttaatgagtaatgttgccaatggaaatgaatgatgccaaaatgtgttgatattaagacctaaataataacgagaaagagctcctaatataccagcaatgccaacgataatataaatcaattttctcacctctttaaatagcttgctcaaaaaaatagactcctaccagtatccatactggtaggagtcattagctaagcagcgtttatggcgaactccatcgcctatgattattacatatagtgtactaaatataccgtttaatttccagtgaggaggagggtgtaacttttctttttttgatgtctgaaggctttttaagtaattaaaatgggatcgattacttatcaactaaatatagtgatatacggttttaattatgataaaatgtttcttatgtgtgtcgttttgttttatttgactgaaaataaagaaaaataaatttgcgtgaaaaggagtcatttatttgaagaaatttttaaaaatcgtatttacatgtgttttagtagtagcgggcattgtaggaggatttctagcttatatgacacttactaaagaacagcctgctgatgttataagcttgaaggtagagaataataaggagcgcgtattagcgactggaaatgagtttaaagttacaacatttaatattggatatgctgggttagataaggatcaagatttctttatggatggtggaaagggatctggttcaagtagtaaagagcaaacggaaactaatttaaagaatatgctttcgtttttacaaaatgagaatagtgattttgcactattacaagaagttgatataaagtcacttcgttcatttgatgtaaatgaacatgaatttttgaaaaaaggattacctgattatgtttcgtcatttggcaagaactacgatacgaaatgggttccagtgccaataacaaatccaatgggatatgcggaggctggattaagtacgttttctaaatacactgttcaagaagcgaagaggttccagctgcctggaatggagccttggccaaagcgtttgtttgatttagatcgagcaattgtggaatataaaattcctgttaataatggaaaacatgttagactcgtaaatttacatttgtctgcttatgatgaaggcgggaaaattagaaaacagcaagtagagtatttaaaagaatatatgaacaagcattatgaaaatggtgattacgtaataatgggtggagattggaatcaattggtttcgaacgctcaattaagtgatccgaagttcgtgaaagagcgtcctgagtggttagtagagttaccgaaggactttacagacggtggctttaaatgggctgtagatccgtctgttatgactgtaagagatgatgtaaagaaatatgtagaaggtgaaaatttcgtcactattattgatggctttatcgtttcaccgaatgtagagattgtaaatgtacaagggaaagatttaaagtttgaaaatagcgatcataacccagtaagtgcggtatttaaactgaagtaattgatatgtataagtagaaggtggggcttcatatggagtggttaaagaggacttgtttttctaaccttgagaaagaatcacagaaaaatcatttattactgtttataacgatttgtagtttcttccttgggataatcgcaattgggtattatggatatatttttacagagagagccatagcattttggatttgtggtatttctgtcgttgcatttggaacgctttttacttttataaaaagtatggaatcagcgtataaatatatcatgacatttatgttgcttacaatgtcttacattatggtacaagcttttaatgaaagcccggctgtatttcaaatggtctattttacattagctgtttcacttatttatttaagcgagcgcctcattttaattattggcggggtagctgttgtgatcacatttatcctttgtagctattggccggagcaattttttgcttatacagcctcatctgaagctgctaatttcgcaagtttgttagcgattgtaacaatcgctatgtggggcgtcacgaaaatcggttctaatctgctccttcgtttaagtgatgagaagcaagaagtaatgagaaaagctcaggagttagaagagacgcaaagacttattgaagaaacagttgtgaaactagatagtaatttcaatcatttaagacaaaatatgaacacgtcgatggaatcgatgagtgaaattaattttgcctttgaagaggtggcagttggtacgcaatcacaatcagagatgatgtatcgttcggtagaagtattgaatgatatggagggaaatattgagcaaatcatctctcaagtaagaactgcatcggctcatgtggatgaaagcttagaaatttcaaaaggtagtgtacatactctaagaaattttgaaactaacatgagaagtttaaatgatgttgtttcacagtctggaattatatttagagatttaatgatgcaatcgaaacaaattaatgaaattgtagatgtaataacgaatatttcaagtcagacgagtttgctagctttaaatgcaaatattgaagctgcgagggcaggcgagcatggaaaaggttttgctattgtagcgagtgaagtgttaaagcttgctgaagaatcaaatcgttctgcgggaagaattcaagggattttgaaggagtttagtaatcaagcaagtaaggtagaagtgcaagtagagaagtcagaaagagtacaagaagaatgtaacgagatgttagcaagtgttttaacaaatgtaactgatttagggaagtttattgatgcgattaataaagtaatgcgagaggttgttgttcatcaagaaagtttccaagttaaaacgacgaatattgtaaaggatgttacgcatgcttctaacgtaattcagcaaacttctacagctacagaagaagtgctagcgagtgtggaagaagaaaaacatcgaaatgatacgtcagtgaagacgttacaaactgttagcgagcaagtgaagttgttagaagatattttagaaaagtaatattgcttagaaagagcacgagtgatgtgctcttttttcattgaaacgaatacttgataggaatttaattgcttttctgcgcgttttctgccaagcttaaggagataaagtgagactagtacatactgattattagccctcaccaatcaagctatccgcaaatagcggaataaaatacttcaaagaaagaattatataggtgacgcatatgatcgaagttaagacttctgaacttagtgatggagaatttaatagaggtgtatttgcaactcgtgatattaaaaagggtgagttgatacacgcagcaccagttatctcttatccgaatgaacagcatgaacatattgagaaaacgttacttgctgattacgcatttgagtatggaatcaatcatacggcaatccttttaggatatggtatgttatttaatcattcatatacaccgaatgcaacgtatgacatcgtttttgagaatcatacatttaacttctatgcttataaagatataaaagcaggagaagaaattttaatcaattataatggtgaagttgataacgatgagctgttatggtttgataaagaaaaagaagagaacgaaaagtaatataaagagtatagaaagagcacattctgtgggatgtgctcttttttattgatgtaaataaagtaaaaagtacaaaaaaataccactttctttttgtgtggtatagtaagatactgagggatagtgttttgaaaaagtcatatattttacaaattgttgtctttctgatgacatgtcaagtttagtagtccatttgggttgctttattatgcaatatatattttaatatgagtggcacctcttataaattaagaggtttataggtgtctcgaattgattttgggtacactgtatccaccactttaggttttttcatgtacgtggggatattatgggcccgtataacgggataaaatgaatatagaaatagaggaatcgtaaaatgaatatgcaagaggtttataaatatttaagtacggtattgcctgaaggacatgttaaacaagatgaaatgttaaagaatcatacgcatattaaagttggcggaaaagcagatgtttttgttgcgcctacaaattatgatgaaattcaagaagttattaaatatgcgaacgaatataatattccagttacgtttttaggaaatggatcgaatgtcattattaaagatggtggaattcgcgggattacagtaagtttaattcatattacaggtgttactgtaacaggaacgacgattgtagcacagtgtggtgcagcaattattgacgtatcacgtattgccttagaccataacttaacgggtcttgagtttgcttgtggtattccaggttcagttggcggagcattatatatgaatgctggtgcatacggcggtgaaatttcgtttgtattaacagaagctgtcgtaatgacaggtgatggagagctacgtactttgacgaaagaagcatttgaatttggatatcgtaagagtgtatttgcgaacaaccattacattattcttgaagcgagatttgaacttgaagaaggtgtacatgaagaaattaaagccaaaatggatgatttaacgtttaaacgtgagtcaaaacagcctctagaatatccttcatgtggtagcgtatttaagcgcccaccaaataactttgctggtaagttaattcaagactcaggactacaaggtaagcgaattggtggagtagaagtttctttaaaacacgctggatttatggtgaatgttgataacggaacagcacaagattacatcgatttaattcacttcgtacaaaagacagttgaagagaaatttggcgtgaagttggagcgagaagtaaggattattggagaggataaagaataacgaaatacgtatgaagatatgaattattttaaaataacatttgggtattgttgacaatttgttttcaattcaatataatggctaataatttaacaagtaacatacgttgaaagagcccagtagcagtttgtcactgttaacgagagagctaggggttgctggaacctagcacaaacaaacttgcgaattacactctggagtatcttaggtaatgctaagcggactagcaatcgatattattgctaagagtggtatgagtagctatgctatttatgcaaactgggtggtaacacggtgaataatcgtccctatgtctatcgtagacataggggcttttttgtttttaaaaaataaaggggatgacaaaagatgaatattattgatgaattagaatggcgcggcgccgttaatcagcagactgacgaagaaggcttacgtaagctagtagaagagaaaaagatttcactatactgcggagttgatccaactggtgatagtatgcatatcggacatttgattccgtttatgatgatgaagagattccaattagctggccatcatcctgttattttaattggcggggcaacaggaacaattggtgatccgagtggacgacaatcagagcgtcagcttcaaacgttagaagtggttcagcataatgtagatgcgttaacagcacaaatgaaaaagctatttgattttggtggaaatagcgaagtgaagatggtaaataactatgattggacacatgaaataaatattattgagtttttacgtgattacgggaaaaactttagcatcaatagcatgttagcgaaggatattgtagcaagccgtttagatacaggtatttctttcacagaattcacgtaccaaattttgcaagcgatggacttccaccatttatacacgaaagaggatgttcaacttcaaattggtggcagtgaccaatggggaaatattacgagtggtttagatttaattcgtaagttagaaggtcatgaggcgaaagtattcggattaacgattccgttattattaaaatcggacggtacgaagtttggtaaatcagcgggtggtgcggtttggcttgatcctgaaaaaacgacaccgtttgaattttaccagttctgggtaaatacagatgaccgtgacgtaattaaatacttgaaatactttacgttcttaacgaaagagcgtattgatgaattagcaacgaaggtagaaacagagcctcataaacgtgaagcgcaaaaagtgttagcggaagaaatgacgaaatttgttcatggagaagaggcgttcctgcaagctgagaaaattacagcagcgttatttagcggagatattaaatcgttaacagctgatgaaattgaacaaggctttaaagaaatgccaacattccagtcttcaaaagagacgaaaaacatcgtagagtggctagtcgatttagggattgaaccatctagacgacaagcacgcgaggacattaataatggtgcgatttctatgaatggtgagaaagtaacagatgtgggtacagatgttactgtagaaaattcatttgatggaagatttattattattcgtaaagggaagaagaactacagtcttgtgaaattaggataataagtaaggctggaaaatatatcggcgatttttcgaatatatcgaccgtaactcaaattatatcggcgattttcgaaatatatcagcgcaaatccgaatatatcagcgattttcccaatatatcgatttaccgacaaaaagcgacaataagaactgttccgaacgggacagctttcattataaaaagtcagtatatttagataaatttaaagggtatataatttttttgacgaataaataagttagagaaaattacggataaaaaatagcccgaaccatgcagggcatgattcgggcttatattcagattagtaagctaagctgaatagacctttaatgtgtgataagtaacgaacgttacttgcttctttcattaatgatgctggtaagcctttaagtggagtattacttgctccaattgtagcaaccgcatctttacgtcctagactagcaagtgttccagagtttacaggtgcgaactcttccaatgctttgccttctagtgctgcgtataagttgtatccaattaactcacccatttgccaagcgatttgtgcagttggtgggtatggacgtccgtctggagcgaagacaacagcgctgtctccagcaacgaatacgtctttgtgagaagtagattgtaggtatgcatcaactgttgcacgtccacggttaacttcaagacctgattcaccgattaatgggttaccttgtacgccgcctgtccaaacgaatgtgttagcaacaagtttttgaccgtcttttaagtcgatttcattgccagcaacgtttgttacaggaagaccagttaagaatgtaacaccgcgtgcttctaggctagtagttgcacgttcgattaagtggtctggtaatactggaaggatttttggacctgcttcaacaagaagaagtttcacttcttttggatttacgccgtggctttttgcaagtttaggcataatgtcagcaagctcaccaactagctcaacgccagttaatccgccaccaccgattacgattgtagcatcagcttcgtttttcgttttcgcgtattcacgaatacggtcttcaacgtgtttgtagattttgtttgcatcagcagccgattttaataccatgctgttttcttctagtcctggaataccgaagtaagcagttttacttcctaaagcaactacaagtgcatcgtaagataaagtagtgccaccagctagtttgatttctttgctatcaactgagaatgactcaactgttgcgattttaagatcgatgtctttccctttgaaaagctttgtaagtggcattgcaactgcttgctcagacacgttaccagctgcaaggcggtgtagttcagtgatgatttggtgtgttgggtattggttaatcactgtaacttgtgcttctgatttgctgtaatatttacgtacgtttaaagcggcaagaagaccgccataaccagcgcctaagatgacaatttgttttgacatagtatgatatcccccgtctttactaattgttgttataagttaaattatttattgttacgttctgcactaatttgaagatatgcgttcacaaagcggaacattttttgtgcttgtggatcttttagtaattttaacaggccgaataggccgataacttcgttgctttcttcagcacgatctttcgcttcgattgcagttgcagccatgcttttcactgtatcttttacaggttctacaagctctgtaattgcaccaacagtgtcgctttttaatacttcatcagtagcaacagtttgagcgaagtcataagacttagttaaaatgttaacaagctcagttaattttggaagctgttctactagtgttgttaatgattcttgtacctcaggttttaacaactgatcaagtacatcaagttgtccttggctagcagaaatttgtacagtttcttgttctggctttgtttgagtcatagtttctggcatctccaattctcctttacgatagcaatactcttattttttataagtaagatagtaaacgtttacgaaactttatacaaagtttcacaaaacacaataaaatgcctttaaatttatgacagcaagtaagctgcaaacataaatctaaaaccataacgtcttacttattatttatgaactgtccgatacatggcttgtccgcataatggaaaagctccgttaccggaaagtgtatataatatatatcctatattatatactatatacacctatgttaacataaaaatgattcctaattatttgatattgagtgtataacgtagtgctgacaaggtatgaaagcgtataaaatattttgttccagttagaaatgtatatacatataaagaaaaaaaggaaaaaatgaacaaattcatgttcgttttttcctttttcctattattcaccttctacaattagcatcgatgtgttaccgcttttttcaagatggcattcgccccaagtacaaagagaatcaagaatggactctaaagaccaaccgtattctgtaagtgaatattctacttttggtggtacttgattgtatacctttctttgaataaccccatcgtcttctaattcacgtaattgctgagttaacattttttgtgtaatcccaggcattaaacgttttagttcactcgttctttttgtgcctttcgttagatgacaaaggataacaaccttccattttccaccgataacctctaaagtcgcttcaacgggaatattatatttcttcatataaaaatctcctttgatgaatgtagatttaagttctccaacaaaagaagctaaataattaaatgttactaaaaagtgcctatagcactttaaagtacgtactttttatcatgttgaatatgttccataatagcatacgtaagagggaaatgagtagtacggtactaaaaagtgcctatgttacttttaggtacctatcgtacttttaagtgcgttcttcaaaaaaagagtaaagccattcataatagcgtatatcaacagtaaagttatttttgtagaagataaaaaggcctttttatcatactattatgattggatttctcgcattaaggaggagttcaattgaattcatatacagtatcttcttcggttatgcagacgaatcggagaagtatgtttgctttattagcactagcaattagtgcgtttggaattggtacaactgaatttattagtgtcggcttattaccatctatctcagaggatttacatgtttctgttacaacagcggggttaactgtttctttatatgcattaggagtagcgtttggtgctccagtattaacgtcattaacagctagtatgtcgcgaaagacgttattaatgtggattatgattattttcattattggtaatggaattgcggcggtagcaacaagttttactgtgttacttattgcgagggttgtatctgcatttgcgcatggtatttttatgtcaattggatctacaattgcggctgcgcttgtacctgagaataaacgtgcaagtgcaatagcatttatgtttactggtttaactgttgcgactattacaggtgtaccaattggaacatttatcggtcaacaatttggctggagggcctcgtttattgttattgtggccattggaatcgttgctttaatcgccaatagtatgctaattccttctaatttaaaaaaaagtacgtctgtatcatttcgcgatcaatttaagctgattacgaatggaagactgttacttgtatttattattactgcattaggatacgggggaacgttcgtaacatttacgtatttatctccgttattacaagaagtaacaggatttaaagcaagtaccgttacaattattttgttagtatacggaattgcaattgcgattgggaatatggtcgggggaaaattatcaaatcataatccgattcgagcgttattttacatgttctttattcaagcgattatattatttgttttaacatttacagcgccatttaaagtcgctggattcatcacaattattttcatgggactattcgcatttatgaatgttccagggctacaagtgtatgttgttatattagctgagaggtttgtacctagcgctgttgatgtagcatcggcgattaacattgcagcatttaacgcaggaattgctcttggtgcttacttgggcggtattgtaacgaactcgttaggattaattcatacggcttgggtaggtggaattatggtagtaggtgctgttgttttaactgcgtggagtatgacattagaaaaaagagatcaagtaaaataaaaggagagaaaataaaatgaaaaacttacaaagtaaaacagtattaaataatggtgtagaaatgccttggttcggtttaggtgtatttaaagtagaggatggaccagaacttgtagaagcagtgaaatcggcgattaaagcaggataccgcagcattgatacagctgcaatttacggaaatgaaaaagctgtaggtgaaggaattcgcgcgggtataaaagaagcaggcatttctcgtgaagatttattcattacttcaaaagtgtggaattcggatcaaggatatgaaacgacacttgctgcatatgaagaaagcttaaaaaaattagagctggattatttagatttataccttgttcattggcctgtagaagggaaatataaagatacgtggagagcgttagaaacactttataacgaaaaacgcgtacgtgcaattggggtaagtaatttccaaattcatcacttacaagatgtaatgaaagatgcagaaattaaaccaatgattaaccaagtagaataccaccctcgtttaacacaaaaagaattacaagctttctgtaaagaacaaggtattcaaatggaagcatggtcaccacttatgcaaggtcaattattagataacgaaaaattacaagaaattgctgagaaacacggtaaaacaacagcgcaagttattttacgttgggatcttcaaaatggagtaatcactattccaaaatcaacgaaagaacaccgcattattgcaaatgccgatatatttaatttcgaattaacgaaagaagatatggaaaaaatcgatgcgttaaatcaaaatcaccgcgttggtccagatcctgataacttcgatttctaagattaaagtaagaaagaagagtgcgtaaaagcactctttttttgtgcataaaaatagtttctaaataaatactacttagtattaagtttgtgataaggggctgtaaacatgaatataaagcaatcgttcaagattttagctatgtttttaagtgttttatttgtgttattcccgcttcaaaaagcatttgcagaagttatggaccatacaaagtatgaaatgaattggagttatagtaagtcaaagaagaaaccaattcgaacagagcttattaaaaccgcagatggcaaaattgctttttgcttaaatgtagatttgaaatctccaagcggtcaagatttaccggaaatggggaaagtggatattaacgtataccgtgtactattgaatggatatccacaaaagagtccacaagaattaggtgtttctgattggagagaagcacattacgcaacgcagcttgcagtgtggaatgcgttaaaacaaatcgatattaatgatttagatttccgcaataaaaatgtagagaaagtaacgaaagacatcgttgcaaaagcaagcgctagtgaagagttacaagaaattacgatgagtgtaactcctacagaagaacaagaagcagtattaaaaaatgatttctttgaaacaggtttatatacagtagaaacaaatgcaaaaagcggaacgtataaagtacaagcaacaggtgcaccagcgggcgtgaaatttgcaaatgaaaaaggcgaaacaaaaacagaatttaatgtaggagaaaagttccgcattttaattccaaaacaaacaccagctggtggatttagctttaaagtatcaggaaatttaacgaaattacaagggattgcgcataaaggtacatcgactattcaaaatgcagtagtattacttgagcgtagtgaagaaaaaacaagtccagagttagcggtaagttggaaaaaggctgaggctccaaataaaccaaataagccatatactccaaatgaaccgcataaaccgaatcaaaagagataatgaaaaagcattggcgtatgccaatgcttttttatatgaattctttaaaggtatatcaagataataattaatcgagtgaaacactattttaacgttttaaaaagtatttaaaaataataaaatgtgacaaaatctaaacgttgcaataaatagattttattcacgaaattgtaacattattctaattagagaggctatcaaacaaagtgtaaagcgtgtaaaattcatttggaaaaactacctatagatggtcatatatgaagaaaatgtaagtttttattgttatttttagatgtatagatgacaatactgaaaaatatcttttactattctcttttttatgtagcaagagaactcatcacaaatagagagaagtgaggagggcatattacatataaattttacaatgtaagaaagcgaatgcatggagagaaatgcggtagtaatatatacaggtgcgcgaggtgttagtccattcatcaaatgtttttataggaataataggattacttattagatgaatatatagggtagtttatctaaataaaggaacaggggacacagattatgtcgaagaaaaagacgagtagggtattagtagctggaatatgtatatctacattattatcgccagtagctttcgaagcatcgaaaggatatgcagcacctttggaagaaaataaaggtgggaaattagaagaggtaaaagagaataagtttgagcagagagtatttcagttgccggggaaaggtagcgtagaagaaaataatcgtttaagagttacttggaaactttccgctaatgaaccgactggaatttatgcagagccaaatgaagagattacaattgacataaaaggaacgcagtctatccaagcttttattggaacgagatcttatgatgaaaaggacccagaggagtttaatttaaaaccagggaaaaatgttatttcatcttcaagaggcggtattttatatttttataatatgaataacgaaggagaagtaacagcttccgttacaaatggtggtagtcactttcctttatttattttaggtaagcatacaaaaaaagattgggatgaaatgttaaaaaaatataaggatccttatgcagttgaattaaaaggtgagagaagcttaattactactacttacgattctgtgcagaaatatatgaagaatacggatccaacagatttaatgaaattgcatgataagattatccgtttagaaaacgcagtggcaggattatctgaggacagtgttgggtttgcaaaatctccaactcattatgttcagtttgttgaaaaacggaagcctgctaaaggggactttatgtttgcaaaacattatcatacaggatatattccaactgcaatgaatagagttttagatatagaggtacttgagaaggatggatggggaccgtggcatgaagttggtcatttacatcagcaagaaccgtggaagtggtctaaagtaagggaagtaacagtaaatatttactcattagctgttcaaaaggcgttagggaatcaattagaaatggatgagcactataaaaactcatttgagtatttagagaagcctaaagcagaaagattcattgatgacattaatcctcttacaatgttttggcaattaaatgtagtgtatggagaacatttttatcctaggttacatcaagcttatcgtttgttacctcagagtgaaatgcctcattctgatgaagagaaaaagcagctatttatttatatgacatcgcaagtggcagggcaaaatttaattcctttctttgaggaatggggattaacaccaaatgatgatattagagagaaaatagaaaaatcaaagttacctaaattagaaaaggaaatctggaaagctacagatagtaatgatattcgtgagaagcaagttgaaccgtataaggttccatatggtgaacctgctaatgaagtacaaaatcttttagttggtacagattctgacgagaatgaagcaagtaaacttgttcgaaatttaggtgagaatgtaaaagtaacaggaaagattgtatggcctaaactagagaatggtaaacaggaagtgttagtagaaattggggatgagaaaggaaataaaaattcaattcctgtccaagttaacggattttatgatgacagtatagtttttcaaggactttcagatgatgtaatgtcgacagtgacacttcaccacaataagaagaaattaaatgtaaactttactaataatgaaatacattaccgttttgaaaaagaagaatatatgggcttaacgctatatgatcgaaatgggattgaaaagaaacgtgtatctgcagaaggacaagaaacgggaaaaagatttgcgatggaactaaatgaattggattttgaatatggtgatgtagtaaaagtattccatgcagaaccggatcgtctgaagttgtaccaaaataatacacttgtagatcaagggaaggctaaaaataaaaaagagaaattattccaaatcactgagcaagggttcgaattaaaagagagtttacaagaagtgacggcgaaaccgcaaaaagtagtagtcggaatggatgtagacaaactagatccgaaagaatttgtacaagtaaaagatggagaagtggttggttttgcagaaaaaccaaatacatcaaaaatcggagaacaaaaagtaaaagtagaaacgaaagatcgatttggaaataagaaagtgacagaagttcctctaacagtaacatatggagatagcctacttgtatatgggctgagctatagagatggtgacttaaaatcaattgtaactttacatcatgatacgaaaaaactgagtgcgacagatacaaagaacctaattcatgattactttaaagatgaaaagtattttgaattcacattgtacgataaagaaggaagagtgaagaaaaatatagcagtaaaaggtttagagaatacgcaagaatttgctaaggaggtaaatggaattgcatttgagtatggagatgtagtgaaagtatatcatgcggaatcttctcgtttacattggtatcaaaaagatgtatatgtgggcgaaggaaaaagtaaagagataaaggaattagtcttcaaaataactgaaaatggatttgaaagattagacggtgagcaaacagtaaaagcaaatccgcagcaagtagtaatcggaacaaatagcgaaacgctagacgcgaagaactttgttgaagtacagggtggagaagtagtaggttttgtagggaaaatagatacgacaaaaattggtcagcaaacagtaaaagtagaaacgaaagatcgatttggaaataagaaagtgacggaagttcctgtagaggtgacatatggggatagtctagtctatcaaggtgtgtccgatgttacacgttcaattattacgttaaaccacgctgaaaagaaattacatgcaacatttacaaatgatgagattcattatcgctttgtaaatgaacagtatataggccttacgatttatgatcaaaatggaactgagaaaaagcatgtaaccgcagaaggacaagaaacttcgcagaattttgcagaacaagtaaatggtatggcgttcgagtatggtgacgtattgaaagtgtatcatgccgagtcagatcgtttaagttggtataaaaagagtgagttagttggaaaaggagataagaaaaagtttaaagaaatttcctttaagattactccaaatggtttagagcaagtgcaataataagaaaaagctcgtaaaacattatgttttacgagctttttttattattcagcttcagaaactactgtgaagcgttcgtttacatgttttgggttttcaatctcatcaagtgctgcaactgcgaagtcttcgtaacttacgtagctatcaccttttgagttaacaagaagattgtctttgccagctttgtaagaaccagtgcgttttcctaatgcgaatagtgcagaagggctgatgaatgtccaagtgatatcatttgtttgttgtaaaatttctaagtttttaccttggttttgagctgttgcaagatattctttcgggaaacctggtgtctcaaatacacgtgttgttttctctttgtctacaaataagcttccagcgcctccaactacaagtaattttgtatttggtgcacctttcatagcttcaataagtacgtttcctgcatctacgtgaaggtgttcttcgcctgctggagcaccgaatgcatttacaactacgtcaaatgcctgcaggtcgttagatgtaagagagaatacatctttctctaaaacttttacgttttcttctgtaatttttgcagcgtttcttacgattgcagttacttcatgtccgcgattcaatgcttcttttaaaatacgacttcctgctttaccagttgctccgataattccgattttcataataaatccctccaaagtgttttgttaaagtgtatatctgaaagtaaatgaatttgttgtaattaggtttgttacaaactgttgtaatcattatagttacgggttggtatttttgtcaatagggttgtttgtgaatttattttttgttttagtatgtacagttagagggagggtagtcagtcataaagatattgttactgtgaacctggctaatatttggaaattgcaaattgtcgaaaaatgttgatttttgaatgttttttaaatataattcgttttatggagaaaaggaggggttaattgtatgaatattttagagcaatttatttcatcaacaaatacaattctttggtcatatattcttattgcaatgttaattggtttaggtctttatttttctattaaattgaaattcgtacaaattactcatttaggggaaatggttcgtttaatgagtgatggactaactggaaagacacgtaaaaagggtagcgtgtcatcgttccaagcattttgtatgagttctgcagctcgtattggtatcgggaacttagctggtgtagcgttagctatttctatgggaggacctggagctgtattttggatgtgggttattgcgattatcggggcttcttcaagtttcgtagaaagtacgcttgcacaaatttataaaataaaagatggcagtggcttccgtggtggtcctgcttattatatggaaaaaggtttaaataaacgttggatggggatttggttctctattctgattacaattagttacggtttaattttcaactcagtacaagcaaacacagttacattagcgtttaaaaatgcatttggtattgagcgttacgttgttgggattgtattagcagtattagttgcggttattatttttggtggtgtaaaaagtattgcacgtatgtcggaaatgattgttccgccaatggcaattctttatattgcggtagcgattttcgttgttattaaaaacttctatttactaccagatgtgtttacagaaatctttaaaggtgcatttggtttagattcagctgtaggcggtggtatcggtgctgcgatgaaatatggtattcagcgcggattatttgcgaacgaagcaggtatgggtagtgcgccgaacgcggcagcaacagctgatgtaacgcatccagccaaacaaggttttattcaaacaatcggggttttagtagatacattcttagtatgtacatcaacagcatttatcgtactatgttctggtgcatataaagcaacgaatttagaaggtattgaactaacacaaaatgcattaagctcacaaattggcccatgggcgagcagtttcttagcgattattattttcttattcgctttcagttcacttctaggaaactactactatggtgaaacaaatattgaatttattaagcaaagcaaaacgtggttaacaatttaccgtattgcggtagttggaatggtattattcggttctgttgcgacgcttcaagttgtatggaatatggcagacttatttatgggtctaatggtaataacgaacttaattgcgattacacttcttggccgatttgcgtacgcggcattaacagactatgtaaggcaaaagaaacaagggaaagatccagtcttcagtgcagattctattcctggtttaacgaatacagagtgctgggataagccagtggtaacagataaagaaaaagcagtgtaattgaaaaggcgagcatcgaggtaaatttgatgctcgccttttttgttgtagtaaatgatgaaaagggtgaggggtaattattaatataacttttttgtttgttcctctcgttatttgtggggaacgtactgttttaaaagtatggctgggcgaagaggataagagattgagtattggataaatgcatgtaatagctatatttttatgaaaaaaacaagtatgttaatatagttaacgtattcatgtcatgaaacctaacataaagttcttgattactaaaagtttttagaatataattttcttattgttaggaagagggggcaatgcaaatatggattttttagctagggtaattggggatgtaaataatatcctttggtcatatgtcattattgcgatgttaattgggttagggctctatttttcatttcgtgtgaaatttgtccaagttcgttacttcggtgaaatgattcgattacttggggatggagcaagctcgaaaacgagaaaagcgcaaaaagagaagagtggcgtatcatcattccaagcattttgtatgagtacagcttctcgtgtaggtactggtaacttagctggtgtagctatcgcaatttcagcgggtggtccaggagcagtattttggatgtggttaatcgcggtaattgggggtgcttctgcatttgtagagagcacattagcgcaaatttataaagtgaaagatgggaatgcattccgtgggggcccagcgtattatatggaaaagggtttaaataaacgctggttaggtgttgtgttctctgttctaataacagtaagtttcggattgatttttaatgctgtacagtctaatactgtagcggcagcttttgatggggcattcaaaacagatagtagattagtcggtcttgttatggctggtttacttgcagttattattttcggtggagtaaaacgaattgcacgcgcggttgaaatgattgttccagtaatggcaattatttatgtagcagtggcattattcgttgtcgtaacaaacattacggcaattccgtatgtatttaaagagattttcttacatgctttcggaattaaagaagtagtaggtgggggactaggagccgcgattttactaggggtaaaacgcggattattctcaaatgaagcaggtatggggagtgcgccgaacgcagcagcgactgcgaacgtaacgcacccagttaaacaaggttttattcaaactttaggggtatttacagatacattattaatttgtagttgtacagcatttattattcttttatcagatgtgcataatgcagctgatttaaatggaattcaattaacgcagcaggcgttaagtcaacatatcggtccatgggcttctatatttgtagcagttgcaatcttcttgtttgcattcagttcattagtaggtaactactactatggtgaaacaaatattgaattcttaaatggaagtaaagtgctattaacagcgtaccgcattgctgtacttggtatggttatgttaggatctgtagcgacaattcaaatcgtttgggatgtagcagatttattcatgggtattatggctgttattaacttagtggcgattgtattcctctctaagtatgcttttgcggcattatcagattacgtaaatcaaaagaaacaagggaaagatccggtattctatgcggattctattccaggtttgaaaaatacagagtgctgggataagtcagcagtagctgataaagaaaaagcagtataatgaggtgagcatcaagtgaaacttgatgctcattttttgttttatccagttgtttatagatggtaaaagacgaacatttatgagcatttcataattaaatgtaattttttaaagaaaagtgcggatatgagttgtgatttatgttagaatggaaaatgcctttgaaacaagagtttttatgacatttcctatccaatcgaaggttacggaggagaaatggaaagttcggattatttcttgttttgaatggtcagacgttcaacgttaatgaagagttaaatggaggattttattaatgaagtttgttatgttccttgtaggattactcgttgtatttgtactcggttttcttataagtgccgatcgaaagaagattaagtataaaccaatcgcaattatgcttattattcagctagcattatcttatttcttattaaatacgcaagttggttatattttagtaaaaggaatttcagatggatttggcgcacttcttggatatgcggaagctggaatcgttttcgtatttggtggtcttgttaataaaggagaggtttcattcttcttaacagcgctattaccaatcgtattctttgcggttttaatcggaattctgcaacactttaaaattttaccgatatttattcgtgctattggtacgttgttaagtaaagtaaatggtctaggaaaactagaatcatataatgcagtagcagctgccattgttggacaagcagaagtatttattacagtaaaagatcaattaagtaaaatcccaaaacatcgtttatatacattatgtgcatcttctatgtcgacagtgtcgatgtcaatcgttggttcttatatgaaaatgatcgaaccgaaatatgtagtaacagcacttgtattaaatttatttagtggtttcattatcattcatattattaacccgtacgatattacagaagaagaagatacactgaaattagaaaataagaaaaaacaatcattctttgaaatgctaagcgagtacattatgcttggtttcacgattgcgattacagtagcagctatgttacttggttttgtagcattaattacagcaattaatagcttgtttgattcaatgttcggtattacattccaagctattttaggatatattttctcaccattagcattcgtaatgggtatcccggtgcgacacgtttctctataagtagttgaactacgaaaagagaacataaatcaggttcaatccttagtagctgcttaatatatttgtctaattttttgggttcagttcattactggcagtccttttttggtagttttagaaattaaattataacatattaatatacgaattataaatatacttttacaaaagatactataagttttttataattcttgatttctcaatttccattgcatactgaattttcctgtaagtattaataactaccattaaaattatcaatccactagattattagaaaaaactggttatctacataattgtttggtaaaatatagatataatttaagagggtaaagttaatatagatcaactaagtaatgctaagaaaatgttttattgcataaaaaaggctccattgctggagcactcaaaataaacaaacgaattaaaacaagaaacagacaatttaactatatagataaaacataaataaatctatatatatgtaaaaatgcatataaaaactctatttattgatgctataataggtttactcgatgattgttatatttttttatggtttttaagcaataaataccttcttaacaccaagtgtacaagaaaagaagacatcttaagtgatgtcttcttttcttatataataacaacacaataaaattaagatggttcaagtgggaggaaggcacctttgggtatcttttctttgtcgaatttgcctaataggtgcagcaccacattgctatcaagttaaaaattttttcacccaaaacaaaaaaacgagctgaattcacataaataactatggaagaaaacaaaaacttaggattaaagaacttgtgatgtatggctatattggctgtttttattcagaaggatatattaatcctgagtatacatttgtatttaatcatgaggatatcgaagaaattatatttgtaggttttatagatgaggagaagaggcatttgtaggattgcttaattgaatatgatctagaaacagatgatcttcaaattccgataaaactagcaatctccacgccaaacttggacaaatcctaagcgggggaaaaacggacgcgaaaatgatgaagagattactattttcaaatcagttggtttggctgtagtagatattatcgttgcgaattatttgtatgagaaagtagtggagcgcgggatgggattgagttttgagggactgccttttggtggtcttttttgcataaaatcttgtaaagtaagaaaaagttgaatattaatattctaatattcaatagaaagataaaatgttttaaagttcaaaataatacattataatatatttagtaaaattaaccaatttatattttgctcattatgtattaaaggggaaatgaaaatggctggacaaattcgtatgtcaccagaggagcttaaatcgaaagcagctcaatatggacaaggtgcaaatcaaattgaggacattttaagtcaactacaaaatttacaaaatgaattaagaggagaatgggaaggtcgtgctttcgaaggttttgatcaacagttcaatcaattaaagccaaaagtacaaaacttcgcacagctattacaagaaattaatatgcagcttaataaaactgcagaagctgttgcttctcatgatgaagaattatcacgtaatttcggtttgaaataaaaattgttttactctatataacaagtatttcaaatgagccatacagcttatattgtatggctcatttgattgcatgcctagcgagtgatattgatagggatatatatttaatgagatttctttggtgcgtctggaaaacttatagaaagggtttgaaagaatgggacaatttcaaagtaatttacaaacagcaacgcaaattgctacgaaaatgggatcagcctctgataggattcaaagtgcaacaagtcgttctataacaaaagcgacgcgtacaacattatctgttaacttcaaagcacaagaagcgaatcagcaagttttagacttgacgaaacaattttccgctgcctttcaacaagcggttgataatattcattcggtatctaatgaatttgagagaatggataacgcacttcacaacacttttcgctaatgtgacaacctacgtaaagtaaaatagtaggaggaaaaagatgagccaagatattgaaaaacaaattaatcaagtaaatcaaaagttacgaaatgtatttgaagaacaggaccgaaatcaattcgcgattcacattcaggagcaagcggaagcagatttttatgaatggagaggtcgaaaccatcgtttgtttgatcgaattttaggaacttggcatggtgatagagaaatgtctcagttttttatgaatacatatcaagaggcacaacatattgaacgaaaagtcacatttgaattagaaaaccaaaaagaaacgttgcttaaagaaagacgaaaccttagtgatttagaaaacgacctttcctatcaacaacaacaattagcgagggaggtcaatgcatgagcttaaatatgtatttaggagaagtacaaggccaaactcaaagtatgaatgctgtatgtaacgctactattcaaggtatggaacaagtcattcagtcaattgatgcctttgcaattgatactgttctacaaggacaaacttatagcagtgcaaaatcattttttgtacaaacctttcgtcctttagcgcaaggaatcatttatctgtgtgaagagttaattcgccagaacgatgcttttccaagtcaatttcaatcacaagtcgcttccacagatgtaattgaacaagaaatattagaacaaattcgagaaattgaccgaatgaaagcaagtatggaagccatcagtcaagctatgccaatcccaggtatggaagctatggtaaatctttttactgtgatgaggcaaaaactgcaagaaaaactagaacatctatatgaatttaattatacttctagtagtaattatgatactgctctccaactagctgttagcattgcgacaggtttggcggaagttcaaagtgggaaagggtttagtcctgcaagtggtacatttagtacgcaagggttgaatatggaatggacaacttcaattcaagggattacagaagagagggcacgacaagctaccaattcaattgaagaaggtgaaatgtgtggtaagctacctgaaaaatctactggtgaaaaaatttgggacggtattgtagatggtacgggacaagcagttagcgatacaatagacggaataaaagctttaggagattgggaaacgtgggaaaacatggggaacgctgctttgcaccctattgataccctcagtacgatgtataatgtattgtcagattcatttattaatgatgtaataaatggagatgctgaaagtcgtgctaaatggggaagttatgctttaacacaagttggattaggatttattggtgataaaggattaagtaaagcaagtaaattaggtcaagcaggtaaagtgaccaaactagcaaaaaataagattccgcaagctgtttcacatattacaagtaatttacaaatgggagatcgctttgcttttgctggtggaaatagtttgcgatttagatttgatacgcctgattttaaaaaagctgaagaaaagctgtcgacctatcagtttgctagaggtgaaagtaattctggtgggagtaattttgttaatgaaaatcatagatcttcactttctaatagggaaattatatctaatttacaacatacagaaaaatttagaccaaatacactcaaacatatcctagagggtgaaataaattggcgtggtgacgcaatgggttatcatactgaagtattggagaatacacctggaaaaataattagcggaacagaagagatattaaatgatcaaggcatttataaagctagggtagaagtgaatggaacccctaaaactggaaatagaggattttctacatttttccctaaagattggagcccgcaaaagattgtagataatataaatgaagcatataataatagaacgtatgaatttggtaacacatattctggaataggttcagagggtataaggattagcatgtatatagatgggaatgggaaaattatctctgctttcccagcggaataaattttatctttagtataaaggagtacaatagtaatgaaatatccatatagctttgaagtacttaccaatggaaaactagttatgaggcttcctcaagaaattaaacttatggagacttttttaggcgttgaagtttctgcgtttggagattggattttagaagaaatacatagtgttttaaatgggaaagaaaattacgtagtagtaaatggaaacatttgtggtttagaaattcggaaagatacaactactgtcctagacaatttggctgaagatggtaagggagatttttgtgagatagaaacgattgaattagtagatttaattcatatttggcaagataaacaaaaagaatttaaaaaaggaaaaaataaagaattgaaataatagatagagctgacttcttatagaggtcagctctatctattatttcatatttctccattatctcaggttttaaagtcttttttcctaaataattatcagcaatagtcattgcaaaagaatctaaaggtatttagatatgatgatgggtggagagatagttcgcatgaattttggtgtaatccatttagtggattaagaattcgtttacaggaagagattgctattgtatctgattttatagaaaatttatatgaagtggatgaatatataaagattttagacgatgctgtagaagggaaatatctcgattttgaattagaatataatgctgcagtagtaaattctaatagtccgtggaaatggaggtagattagtggtggagaaaaattaacagctccccaaaaagctattattaggcaggttgctattgagaaaggtttaatacctgatgttcctatgaaattaggtacacaatatcctgattttaagaaagctggtttaattattaaatcggatgagttaccagaggaaatgtggttggcaagtgacaaacaacaatttaaatggttagatgccaggtaaaatggaattagtaccatttggaatacataatagcatatttcataaaggtgggcggagtgaaggacattggtcttatagatctaaaggtaggtaaagaaatggaggaattaaaatgaagattaaaaatggtagtgaacttcaatcaccaaatgatgaattaattgaatcatttgaggaatattgtgagataaaattaccaaatgattttatagattttttgaaaaaatataatggctctattccaattactaatgttttttcacatgaaaaaaacgaacttttaattgaacgtttcttatgtttgttggaggacccagaagatgatgatgaaaatggttggtatgatatagaggttgtattatctgatatcgatactcgtttaacggatgatgaagatttaacagggataaatgttattccatttgctgttttattcgcaggtgattttctttgtttagattttagagaaaaggaaataccatctgttgtggtatggtatcatgaagaatcagaagaattgaatccggtaactagtgaagttgcagataattttagtgagtttttaagtatgttaaaagaataatgtaagaaaaataattaaattttatttatgggtttgaatttttattaaagtttttttgcttttaatattttaattaaaaaagaagactaatatttgctttttaataggttgatatatattttaaagaaattaaaggagaaatgtatcaaggatattatccttttcttctttattgataccaatgtatttaagtgtaaattgtgggcgatatagattgttataaatcctaggaaacagcaattacaatacactctatttcgtggggtatttggcatcgtatgttcagtaggattattagttataacccaaaagtttgcatatggaatgttaggattacaaactcctatctattttattttttcggttggtttgtatatttttgctttgcattattattataaaaatcatattaaaaaacttcaggaatcaatcaaaaaatcaaaatcatcgaaaaaaaactctagttttggagtagtggcttttgtaggattgggtcaactcattgctaatatcagtcttggttttgcaacacaaaagatggtagcaattgtattaatgtgtgtatactccatgctttcgtttatgttgtttcatttcattatggaactccataggtactattatttaaggaagcatatagaagatgggggtagaacacatgaaaccatttaaagagtctgtattgaattttaagtatataatcgtggttctcctatagtcagtaaagaatgcggaaaagaaaagggagaagcaacatcatgaatatagaattacatttagataaagcaaggatagggaattatgcaattttttaaagaaaagtttttaccaaatggctctattgttctcttaaaaggagggacaaaaaaggttgtaatttacggaagaaaacaactacttatggttgaagaacctgtataactacataggctgtttttattcagaaggattataaaactaatccacttaacgagggtagaacagctcctaagattgttgacaagggtacttttgataaaaatgaatttgaaggtattgcatacgaattacctgaccccactagtcggtggttagtagaatatggacgaaatgctaaacttattaagtaagagaggagaacgagttaaatgattaagcctttatacgccgaaaatattatagtgggtgtaaaatataaaaataagctcaattggtatataactgaatcagatttatggtgtttagattataatcaagctggttatcctcctagtgaatatccagaagaaagaaaaggcattagtattttaaatgagactacaatagctaactttttagaaagaatagaaaaatataaaagatttacagaagatattaggttagaatttttaagagaactaagaactaatagagaagaagcctattatgattataatccatgtttcctaatagattttgagcgtttaactttttattctaattatccggaatcaatatcttttgaagaatatattccgaataactggagaggttatttacagcgatttgatgaacaagtaccctatgaatatagatactgggaagataagaataaaagctatttagttagagaggattaggtcattgaagaaaataaattaattatgataaaagaaacatttaagaatgaagaaattggtggtgtaaaagtagcagctattgcagctggatcggggcagttaattgctaatataattcttagcattgcaacacaacagatgggtgcgattgtatttatgtgtgcatgcacagtgttttcgtttggtttgttttatatgattatagaactccataagtattattatttacggaagcatatagaagatggagggaaaatacgtataggcttttaaagagaatttgttgcatttcaagtatataatcgcattcttcttatggaagccattcacgaggcttatagcaataaaagatgtataagtggaagattatattgtggtaaaacatctgaaggaatggaaattaggtttgttcttattaatgataagattatagctgtttatcccgtgtattaaagaatgtgaggtactcaaaaatgaaagtaactaatcagcccatagttaaaaatgtaagaaaatatagaggtaattgctaagaagcactccccctaagtttcagatgaaattaaatgattgaatatttacatttaaataatcgactatttatgctttaatatttatatgtacataattgggataattagggatttaaatttaatatgttttaagaaaggggaatgttttttatatggaaactccagaaaatcaatttaaacgtgcgcttaatccttggttctccatttggacaaaaccacgtgatacaatgaaagaaatttttatatccaaaccaaagaatgtgtttttactcattttactaggctcattcgtacagactttagatcgagcatcttctaaaaatatggcggattcaataagtagtccagtttcattaatctcaatggttatattcggtaccttcgttgccttcttaatttattattttttgttaccagcgttatttaattgggtggcaaaaaaacttggtggacaaggtacctttgagaaaacacgttactcagttgcctattcttatatcccttacgtttactctcttatattagtttgggtgccttcatttttcttgtttgggatagaaaactttacgagtgagacaccgaaaatggagagtagcataactttaacgattttgtttcttatttttgccataattgatatagttattggaatttggacaatcattatttccttaaaatgtttaggagaagcacaccaattttcagcatggaaagcattattaacaataataatatcctttatgattatcattcttcctttggtaataatagtatttcttatagtaggggttacaatcctttaataatttatttgcttcttatgaacttagagatttaattgaggtttggggacaagcacaaaaaatgtataaaaataataactaaaaaattaacttttataaaaacatttaaactaaaatgcttcttaagcgtgggtccaatagctcacgctttttattttgggtgactataatatttattttttaaatatataatcatgctatttgttacggacaaaccttcaaagaatctattggtgctacagctaattgaaggcgtattaacaatttgagagtagttattgataagaatggaaatgtaatagctgtgttcctaaagaataagaaaagtttaacatgagtttattttttttattcggggaatatgggcgtaattggttatcgagaaaaaattcaggagaataaaattatgaaaaaaataaaccatgaattatttggtgaaattgttcacgatttatattggagcggacaacaaaagataactatttttgggcaggaaaaaatagtttctttaactattgatggagaagaagatgatttaattcctaaagttcaagaagaagcatataggaagttcattactgatataaacaaacttacaaaagaagctgaacaagcaatattcgagtattataaagaagaatatatggaatatagagatatggtaggtgatgaatctgctgataaaatagcgccgattataacaaccattcaagaactaggaaaattggtggaacctgttgggttaattatattaccagattttgaagatggaattagaagagttggattaatattcaattgtacctgggaagaggacggtgtcggggtgaaatttgaaaatgagcaagttgtagaagttggttatcaagacatcgttatttgaacttcaaattatgtgctgtcactatatcgaacagaagctgggtttgtaaaataacaatggaactacgtgttttttcgtcatacaaaaacctctacatataagtagaggtttttaaattatatcttaatgaattatgcttttttagataaagcaaatcgagttcagattaaagaaaaacatagaatacatcattttaactagatttattattaactaaattgtccccaccaccaagctctgcctcaatctgcgaagttttcgatgactcatccatacgccaatacgtaataaagcttatcgcgatacatccagctacgtagaagtagaatagtgattccataccaatactttttagccataatgcgatgaactcagctgttccgccaaatatcgcaactgttagtgcatatggtaaacctacgccaagtgcgcgaatttcagttgggaagagttctgcttttacaattgcgttaatcgaagtgtaaccagtaacgataatgagaccgaccatcatgagtaaaaatgctacgattggttctgtcgttttttccatgaagaagaagattggtgctgttagtaatgttccgagaataccgaatgccattaatagtgggcgacgtccgattttatcggatagtagcccagcaattggttgaagtacgacgaaaataagtagtgcggcaaagttaatccagcttacaacttctttcggcagaccgactgtgtttaccatgaacttttgtaaatatgttgtgtacgtataaaatgcgacagtgcctccgagtgttaggccaactactgttaatactgctttcgggtgtttcataagagcgcgaacggttcctgcgctttcgcgtttttgcgattttatgtttgaaaactgctctgattcatccatcgtgcggcgaagccataatacagctactgcgcccatcgctccaataatgaatggaatacgccagccccaagctttcatatcgggttcgcttagtaattgctgaagaacaatttgaacgcctaacgcaaccatttgtccggcaacgagcgtgacatactggaagcttgaataaaagccgcggcgtccactactagccatttcagataaatatgttgcggaagttccgtactctccgccgagtgataatccttgtagtaaacgggcaagaactaaaataattggtgccataataccgatgctttcgtaactaggtgtacaggcgataatgaaagaaccaccggccataaccgtaatcgaaagcgttaatgctgcccggcgtccgtgccgatctgcatagcgtcccattaataaacttccgatagggcgcattaaaaacccaactgcgaaaatagctgctgtgttgagtaactgactcgttggatctcctttaggaaagaactctgctgagaagtaaacagcgaaagcagagtaaacgtaccaatcgtaccattcaattaaattgccgacagaacctttgaaaatattgccggcgactcgattagattttgcttgagccatactaattcctcctcttgcttagtaataaaaggtatatatgaaagcgtgttcattgtatttgaattgtactgttctttattagaaatctcaatattatgacaattttattctttttgtactttatgtacatggagagttttaatagttgcttcattttcagttttgtcataataatagaaaaaggagattgatagttttgaatattttatcaaaggatatgaagcatgaaaaaatcacgcaaagtgtcattacaaacgaaaatagtaagcttaattatcgcgttaattgtatttgtcgttctcctactaacaggaatatttgtttacattcagtccgttgatacgaagcaccaagtggaacagttagcactgcaaacggctaaatctctttctttcatgccagctataaaagatgcttttcaaaataaagaacataaaagtacgatccaatccattgcggaacaagttcgtgagcaagctgatgcagattatatcattatagaagatcgctttggggtgatgtattcccattcaaattcggaattaattggcacaaagagtaacaacccgtataactatgaggcacttacttttggtggctattatacactcgaaggaaatggtacaagtggtcctgctttaatggcgaaagcacccattattgttcgtaatggagattacgaacaagtagtaggcgttgtgacagtagagtttttaataaaaggtattgaatctaacatactgagcagaacgaaagaaattatactcttttccttagctgtattagtagtcggaattattggcggcattcttttagcacgtagcattcgtaaagacacactcggtttagagccaaatgaaattgcagcgttataccgtgaaagaagtgcgatattactatctataaaagaaggaattatagctattgatcaaaacggttttattacgatgatgaacacctcggcagaagaaatgctacatgtaaattgtgattatatgcagcaacacatttcaaaagttttaccagaatttaatatggaaagagtgctagaaaacgatcaagaaatcgcgtttcaagataaagtgtttattttaaatatgacaccgatacttgaaaataacagtacggtaggaatggtatgtagttttagagataaaacagaactgcaaaaccttgtgaacacaatatctgaggtaagaaagtattctgaggacttacgcgctcaaacacatgaatttacaaataagcttttcgttttatcaggattacttcagttaggacattacaaagaggcgattgaatttatccagcaagaatctaatattcatcaaagccaaaatcatattttattccatcaaattcatgatgcaaaagtacaagcaattttattagggaaaatcggaacagcatctgagaagaaaattgattttcatattgaaggagatagtgcgcttcatccgttaccagaccatataaaggtgtcgcacctcattacgatccttggaaacataatcgataatgcgtttgatgtggtgagtgggcaagaggagaagagagtttccttcttcgttacggatataggacacgatattgtatttgaagtgatagatagtgggataggaataccggtagaaaaaattacgaccatttttcaaaaaggattttcaacgaaaggaaatgatcgtggttacggattagcgaatgtgaaagaaatggtagatctactagagggaacaattgaaattcaaaacgagaaaaatgggggagcgatttttacaatttaccttccgaaaacattgagagaaagtacatgacaaacagggggatgggcatatgttgaaggttgcaattgcagaagatgatttccgcgtcgcgcaaattcaagaggagtttttattaaaaataaaggacgtaaaagtaatcggaaaagcattaaatgcaaaagaaacgatagaactactacaaaaggaagaaatcgatttacttctattagataattacttaccagatggaattggaactgacttattaccacaaattcatgctgactttccaagcgttgacgtcattatggtaacggcggcaaatgaaaaccatatgttagaaaaagcaattcgaaacggcgtaagtaactaccttataaaaccggtcacgttagaaaaattcgttcgtacaattgaagactataaaagaaagaagcaactattacatagtaacaatgaagtaaatcaagcactcatcgataacttcttcgggacttcgcaaacacaagacataaaaaacttaccgactggtgttgatccgttaacattgcaaaaagtgaaaggaattataaaaggattcgacgagggcattacaatagaagaaatgggagaacaaatgggggcctccagaacaaccgcaagaagatatttagaatacttagtagcgacaaacgaatgcacagtagaatacacatacggcattatcggacgaccagaacgaaagtatcgaataggacgaggactatgaaaaaacgattattactatgtatatggatcatgacaggagtaatagcgggatgttcctcggagagatcccatacgaataaaatgagcatcgacaaagtagaaatcgttgcgccgaacgttcaaggagcaggctgggacttaacagcgcgggcgatgcaaaaaacgctcacagaagaaaaaatcttcacaaaaccaatcacagttacaaacaaagtaggtggcagtggtgatgtcggatggaaatatacgaaacaaaaaggcggtcacgtactggcgattaactcaagcttactcataacgaacaacctactaggccacagtaaactaacatataaagacttcacgccactcgcaacattagcatcggactgggaagttgttgtcgtatcaaaagactcaaacatagaaaacgcaaacgaactaatgaaacaactaaaacaaaacaagaaaaacttcaaaatcggagttgcccccggcctaggaaacgacgatcacctatcattcgtacaagtaagcaaagcattcggcataaaccctgccaaactacaattcttcgtctacgaaaacaaagaaaaaatcataaatgccctaacgaacaaacaaatcagcgccgcaaccatgaccctatccgaagccgaaaaacaatacaaagccggaaaaataaaaatactagccgtatccgcaccaaaacgactagaccgactaccagaaatcccaacatggaaagaacaaggaatcaacgtcatcttccagcactggaaaggaattatgggcccaaaagatatgacggaggaagaggttgcttattgggatggtgttattaagaggatggttgagagtgatagttggaaggggattttgagggagcggggttgggagagtttttataaggggagtggggagagtagggggtttttggaggaatgtgattttaggtatgaggaaatgttgaaaaaagaggtttaagagggaaggagtcaatcgggctttatttttgtagttacttctatataatataaaagagatgagagtcttaggctaattacattaaaagggctacatagggatagataaaatctagcttactgattaaaaatatattagtcgttaaaagatataaaaggcatttttcagtctataaagtgtggaaacataaagtatagagtttctgtgagatttaaggaggacataatgaagaaaaatatttatgttgttggagcagtaattgttcaagatgagaaaattttatgtgcacaaagaggaccatctaaatcgctacctcttatgtgggaatttccaggtgggaaaatagaagagggagaaacacctcaagaggcgttaaagcgtgaaattgatgaagaaatgcattgtagcgtgcagattggtgagcaaattgattatacagcctatgagtatgattttggtattgttcatttgaaaactttctattgtaaacttgttgaaggaagtccggttctaactgagcacgtagcaattaaatggttatatccgaatgaactagcagctttagagtgggcacctgcggatatcccgactattgagaaattatcaaaagaatcgattgtaaagtaatttgaaaaaaactattcgttttatgcggatagtttttttattgtaataaatttgcactttaaatcagtgagtaatacaattaatataaaaaattgtcataaatggtgatcatatggagaatttcattcaaaagttagaggggtctttatataaagggtttattgatcaaaaacataatcatcctggaatatataagcctaaattattagtaaacaatacgaagaaaaatgaaaatgttttaagctcattgctggaagagcttgaaaatagtacagcctttattttctcggtggcttttattacggaaagtgggctagcgactttaaagtcacatttccttgatcttaaacaaaaaggagttaaaggacgtatattaacatctacattcttaaattttaatacaccaaaagtgtttagagaattaatgaaacttgaaaatgtagaagtaagattaacaaacttatctggttttcattcaaagggatacatatttgataacaaaacacattgttcattaatagttggtagttcaaatctgactgcacatgctttgaaggtaaactatgaatggaacgtcaagttaacatcgcatgaagatggagagattgttcaacattttaaaaatcaatttgaagaagtttgggagcattctcaagtattaactgaagagttaattggaaattacgaaacaatatatgaacaagttgcagaaaataagttactagatcgagttatagaattacctggtcaatatcataattcaattgaagaagctttgaaaattaccccaaataaaatgcaacaagctgcgttaaaagaaatacaaactattcgagacgctggaaaagaaaaaggattagttatctctgcaacaggaacggggaagacatatctttcagcatttgatgtcagaagttttgcacctaaacggatgctatttattgttcaccgagagcaaatattaaataaagcaaaatcagattctcaaaaggttcttggtggagtagatgaggattttggaattttatcaggatcaaataggcaaataaatgctaaatatttatttgcgacaatccagactatttcaaaggaagaaaatttacatcaatttgatcctgggttatttgattatattttaatagatgaagttcataaagctggtgctagttcttatcatagagtcattgattattttaaaccgaaatttttaatgggaatgaccgctacacctgaacgtacagacaattttaatatttatgagctatttgattacaacattgcttatgaaattcgattgcaagaagcacttgaagaagatatgctttgtccttttcattattttggagttattgattttgaatataatggtgaaaagatagatgacactactgttttatctaagcttgttacggaagaacgagtggatcatatagttgaaaaagtaaaatattacggtttttctggtaagaaagtaacaggactaatgttttgcagccgaaaagatgaggcagaacaattatcacatgccttaaataatagaggttttcgcacatttgcattaaccggcgatcattcccaagaggaaagagaactgcgggtgaatcaattagaaaatggcatactggattatattttaacagtagatatttttaatgaaggtattgatattccgagtgtgaaccaagttgttatgttgagacaaactcaatcaagcattatctttatacagcagttagggcgtggacttcgaaaacacgattcgaaagattttgttacgattattgattttattggaaactataaaaataactatttaattccgattgccctttcaggagatagatcacaaaataaagataatatacgtagatatacaaatgacacgagttatattaaaggtatttcaacagttaactttgaagagatagcgaaaaagcagatctttaaagcgattaacaatagtaatttaacagcaatgaaagtattgaaggaagcttttgctgagttgaaaaatagaataggaagaactccatatctatatgactttatagtaaaccattctattgatccagttgtacttgcagaaggatattcgaactattatcagttcttattgaaaatgaaagaagatgtccctgtattaacagagtacgaaaataaagttttaacgatgttttcattggaagtattgaatggaaaacgtaaaaacgaaatcgttttgttagacttattattaaagcaagaaaaagttgataaggatgagtatataaaacaacttgaagaatctaattgcttaacagatgatgaaacgattacttcagtacaacgaatttttgaattagagtttttctcacaaaacagtcaaaagaaatatggagaaaagccaattctctctttacaggacgataagatgtatatgtttaatgattctatccgaaaaagcttagaacaaaatcaatactttaagcgtatggttatggacattattaaaagtgcaaggaaaaagagcaaaaactatgagtgtgatagtaaccttactgtatataaaaaatactcaagaaaagatgtgtgtaaacttttaaattggcataatgacgagagctcaactatgtatggttataagacaaagtactatacttgtccaatatttatcacataccataaaaatgatgaggtagaatccagtgtggactacggtgatgaattccttaatcaagatgttcttaaatggtatacaagaagtaatagaacattaaaatcaaaggaagttcaaacaattattgatgctaaagaaaataatattgacgtccatatttttgtgaaaaaagatgatgacgagggaagcgacttttactatttaggaaaagcgacacctgataaagcaagtgtagaacaaactgaaatgaaagataaaaatggaaaagaactacctgttgttacgatgaatatgattatggagaaatcaattgataataagatctatgattatataaaggacggtaatgttttgtaggtatattaaatttttaatatctttatgtttctaaaattattaagcgaatatagatggggctgtatcaaaatgacatcggagtatgcttttgatatggtcttttttattggaatttaatatgttttttattagatttgtggattcatttaattggtttaagcagaatgtggagatgagtctttctaatcgaagtaaccgataactagcccctcctaagccccttacaagccccttacaagcccctaccaagtaataaatcactaagaaaaaacataacaaaaacaactacaacaacaaacaccgtagtagtagtcaaaaaaaatttgaaataacacgccaaaaaccctgccatcctcccatatatattatgaaggggcttttacttttgaacggagacgggaggaactttgatggcggtgtatcgtactgtgcaggtgaatttttggcaagatgattttgttttggatttgacgccggaggagcggtatttttatgtttatttgttaacttgttcgaagacgacgcagtgtgggatttttccttttccgaagcggttagctgagatggagacgggttataacagggagactgttgataagcttgtgcagcgttttgttgattatgggaagattctttatgatgcggatacgcgggagttattcgttttgaattggcttcgttataatcctgtgacgaatacgaatgtggagaagtgtgtgcttcgtgagctgaagggtgtgaagaataaggagtttgtacatatgtttcttcagaagtgcatagaggaggagctgaatgttccgatgcttttagcgcatttcggcatgcctggtgatgtggctgtggatgatgttgagccggtttgtgaggagatagaggaagaaacgggaagtcgcgtgttttctttttatgagcaacatttcggtagtttgtctccttttgcggtggaggaactgagtgcgtggatggaagatttgtcagaggagcttgtgctgaaggcgcttcaaattgcgtttgagaataataagcggacgattgcttatgtgaagggcattttgagagggtggcacgggaaagggtttacgaaattgtgtgaggttgaggcagatacggctaagtttcggaagaaggagttgtctgttagtacgggggagacggaggagtttttggcgaggtgtgaggagtgggagaagaatgcgccatctgaggaagagttgcagcgctttttagcggagcgcgggtggcggccatgagtattcaaaatgtggaggcggaaaagacggtgttaggttctctattgcttgctggagagcttattaaggagtgccgtttgacggagcagtatttttcgatgccggtgcataagtctatatttcagttaatgcgaaagatggaaggagaggggcaaccgattgatcttgtgacgttcatttctagggtaaatccgaagtttttagaggggatcgggggaatggagtattttatagggttaatggatggtgtgcctacaactgccaacttctcttattatgaggggcttgttcgaggtgcctggaaaatgtatcaggcgggtgttcttgggcacaagatgggagagcgtcttattgcggagaagagtgagaaagttatcggtgagacgattacggcactttgtgaattagaggagaaagactctgtatgtgagtttgatttgaaggatgcgttagttgatttgtatgaggagcttcatcaagatgtgaaagagattactggtattgagactggttatacatcgttaaataaaatgacgtgcggattgcaggaaggtgattttgtcgtccttggtgcgcgtccttctatggggaagactgcgtttgcgctaaatgttggactacatgcggcgaagtctggatcggcggttggattgttttcattagagatgagtagtaagcaattgttaaaaaggatggcgtcttgcgtaggtgaagtgtcaggaggtaggctgaaaaatccgaagcatcgttttgcaatggaggactgggaaaaggtgagtaaggcgtttgcggagattggtgagttaccgcttgaaatttacgatcatgcaggtgttacggtgcaagatatttggatgcaaactcgtaagttaaagaggaagcacggtgataagaaggttttagttattgtagattacttgcagcttattacgggtgatccgaagcataaaggtaatcgatttcaagagattagtgaaatttctcgtaagcttaaggtattagcacgtgaattaaatgtttgtgtagtagcgttgtcgcaattgtctcgttccgtagaagcacgtcaagataagcgtcctcttttatctgatttaagagagacaggacaaattgagcaagatgcggatgtcattatgcttatgtatcgagaggattattatgataaggaaacggtgcagaaagagatgacggagattcatgtggcgaagcatcggaatgggcctgtggggagttttaagctgaggtttatgaaggagtttgggcggtttgtggaggggatgaattcttgagcactttatatgattgttggtggtatgatatccctgattacggcccggattgttgaacaagaattacaagggtgatacatgccaaagatgtatcaccttttattttttatgacgttttagatattgataatttgtaataaagtttgagcaaatgtcctatattgataggcaggatttttactttttcagcaagcgggttatttgttgaatagttcaatacctattattttgttgcggtgaatatactggagggtatgttaagactttcattaggataggagtgaataagtaattatgaaaaaagcgatacgcgtccttatttctggtgcgagcattaccggtccggcactcgcttactggcttcatcgttatggcttcgacgtgactgtagtagaacgcgcacctgcattgcgctctggtggatatggggttgatattcgtggtgtagctgttacggtgcttggacagatgggtatactcgatcaagtccgtgcagctgatacaaacatgaccggtgtgtacttcgtgaacagcaaaggtgatgttgaaggtcaattaagtgaagcgagtttcgcgaaccagcatggtgtggacatcgaaatcatgcgtgatgatttgagtaatattttgtacgatttaactaaggatacaattaagtacatttggagtgagtcaattactgctatacatgaaactgaagatggtgtagaagtccaatttattcatgaaaagccacagacgtttgatctggtcatcggtgcggacgggctgcattctaatgtgaggtccctgacttttggtgatgaagcacagtttaaacgtacacttggttgttatatttcgattttcaccctcgagaattacctcaatcttgaccaccgcgtaatgctgtatacaatgccaggtaaaactgtgggtatgtatagcgctcgtggtaatacagaggcaaaaggtatgctcctgttccaatcagaggcactggagtacgaccgctatgatgaagaatctcaaagaaaacttgtagaaaatgcctttgtaggccatacagaagactgggaaacttcacacatacttaaaactatgaaagaggcggatgacttttactttgatgagatttgtcaaattcacatgccaacatggtcaaaaggtcgaattacattggtaggtgatgcggcgtatggtccatcacctctatcagggcaaggtactagtctagcgcttgtcggagcttatgtattagcaggcgaacttaaaaacgcgcatggtgatcattcccgtgcctatgttgcttatgagcaagagatgaggggatttgttgagaagaatcaaaaaataggaaaactagctgctgggagcatggttgaaaaatcgagctttaaaatctttctgcgcaatttcatgttacgagtaccaatccttatggtcttccagtttaaggtaatctcgaaaatggtagcgaaagccgctaacgggatcgagctaaaagactattaatatgaatatgtaagaaaagagtattgtctccatgatttatattaccgaacaagattgattgtaataactgtttctggttaaaagaatgaaaaattaataaatataaatgaaaaaattattggataggggaagtttatgggaaatcactcgaataagtcagatgaagaactggaacggttatattatgaagggaatacacgtgcaagtcgagatgcagaaaataaattatacgacagaggatatacactagattctaatagtgatacatgggatttagcatcaaatcaaaatgatactcattcagtagggattccaatacctactggacaaggaacattccttctgtttttagctattttaataggcggtttaatcgcttttttcatcggtggatttctcgttattgcgtatgcggttgaatatgctacatatatttatgtgggctttgttatatcatttgtactcatgtatgtaacgaaaggtaattctagatttatgagttttttattttatttagggtgtttagctctagccactaggttatttacaaatgttattgaactgtttgaaaatgtagattacgtcacttttataatgcgagatacggatggattaggcgttattattaaatatggaattatatatattatatacgcagctgttattcccttattgttaatgaaggtaataacagcaattgtaagaaaaacaaatttaaaatctaataataaaaattctacattaaatatttaaaaaagaggtgtcacatagttataaggtgacacctcttttatttgatctaagagagacgggacaaattgagcaagatgcggatgtcattatgcttatgtatcgcgaggattattacgataaggaaacgaagcagaaagagatgacggagattcatgtggcgaagcatcggaatgggcctgtggggagttttaagctgaggtttatgaaggagtttggacggtttgtggaggggaaatagtgaaaagactggagtatcactttgcaaataaaataaagcataagtgttctatttcattcgcttatgctttattttttgaatatgttcctcatttccccataaagaaagactttctctctgcagtaatccattgctgcaagtcatcttggctacgtcggacaagtcgatttactaaaacatcatgccatacataatcctctaataagtatatatgaacggggtcatctgtataaaaagcaatattacgctcttcaagtgatggtccataaatcatctctttagaatctatcgatacaataaaccaatgttctgtagacaaggtttctgtataaggtgttatgcgatgggcttctagatttttaatgggatcttcaacatgtagggtaataccttgtattgtaactttatcagctacttcagatagatcttcttttaacgcttcatacatctcatcccacattgaaatgacaatacgtcgttctgctttttttattaatgtctgacagtagctaatgattgtttgattgtcttttaaagtaattactcgattatccgttttttcctcggaagtttctagtttttttaatgaatcacttattccttcgtaagtagattgccattctgtttgcgccttctgtaaaaagatttcaacaggtagaggtgaatagcgggtggtgtcatttatttcttctttcatgacaattcctttttctacaaggttacctaaaatctcataaattcgcgctcttgggacacccgaatctttactcacttgataggctgtgacaggcccctgtttaacaagagatacataagatttagcttcatattcattgaaaccaatttttttaagctgttgcactatgtagtccacttttttcgtcctccgatgtttgcttttatattttaacgttacaataactatttacatttagcaaattattagttactattcgaatagtgactaaaggggaggttaatagtatggatttttatttagacccatccgtattaatgattttgattgtttttgggtttgtggctgcatttattgattcagttgtaggcggtggtggattgattgccttaccagctttattgtttacagggctgaatccagcaagtgcagtagctacgaataaactagcatcgacaatgggaagtgcaactagtaatattgtgttttatcgttctggtaatcttgatttgaaatcggcgtttaaattagttccgctcactttcataggttccataataggggcatggactgttcatttaatgaatccagaagtattgaagccattaatgctgatcatgcttggtgcggtcgctatttatacgatattcaaaaaggattggggtagtatttccactcataaaaaattgtctggtcgacacgtcattatttttactttttttgtttttgctattggtttttatgatggatttctaggtcctggaacaggttcatttttaatgttttctcttttatttattgggtatgattttttaaaagcagcaggtaatgcgaagcttcttaatttaggaagtaatgttggtgcattgttgatgtttatgtatgtagggcaagtcaactatgcgtatggttttataatgggaattgctcaaattgctggagggattgttggctccaaattcgctataaaaaaagggagcgggtatgttcgtgcccttttcattacagtaacttgtttattgttagcgaaaaatctgtatgactatattcaataagtaattaaagaacgtagaaaaggtcaagtatgcaaactacatcgagtataagaagatactaaggagagattccttttaacattttttagatgctaccttgtttgaagatagcatctaaaaagaaaatctaagtgaagagaatgaaaataatataaactcatatttttctggggtatgtttattgattctattgaaatgtttactctatattcttcttataattaggcctcaacaaactcttaaaatccaactcagcaattaacacactcaataatataagcgtagcccctaagtatccttttcctgtcagcgtttcacctgtgaaaacgaaagcaaagcctgcggaaaagacaggttctaatgaaaaaataagacctgtatgggtaggtgtagtgtattgctgggcgataacttgcacgatgaatgcgactgcggtgcaaaatatacttaaggctaggatgattagccatgagttggttgtgctaggcagttttggcgtttcgataatgaatgaaaaaataagactaaataggccgacgaagccgagttgtatgactccaagtgcaatggagtttacatgttttgttacacttccagtaatgatgacgtggatcgcataaaacagtgcagacagtatgcaaaatatatcgccgttaccgattttgaattcgctcgttaatgttaataagccgattcctattatcgttaaaatgatccctactatcactttcttttccggaatgtgttttaaaaatatagctgataatattggaatgaaaatgactgtgagacatagtaggaaaccagcattagaaacactcgtatactttgtaccgaaagtcgcgaaaatgtaaacgataaataagacagaagcgagtataaatgcatattttacagttttaaaatcgatcttaaataaatgtttgtaaaatattaaacctgataaaagaaaagcgataataaatcgtaatgcgattaaattatattcttctatgccatcaagtccaagttttgtaagtaggatggatgcaccccaaaaaaatgtaactagtagtaacattaaatccgcttttaattgtagtttcatttctattccctcgttatgtataaattttataagcccatacccctatccccattattcattttaatattaattctgaatatttgtaacttaaatttatcgacgttttattccataaaaaaagaggctgtttataaaacagcctctatgtatctgaaaatccgaaccttgactaaagactacgtacaatctccaacccttttcttgttaaatgaatccctgctctacctttttttatttccacataacctttcatcttcaggaagttcaatcggtgtctaacctgtgcctcagttaatttcatttcgacttcttggctcttttcagaaataattcttcttccgattgcttttcctttttcttcataattcatgataagggtaaggatgaaaagtgattcttgatcaagagcgtttgaatttgaagaaaagggtttaatattttctgcctgatcgctatttgttttcttatgtggaggcttttgaaaataatgttgattaggcaaatcattttttgttatttggtttccggtacggacagcaagcatgtaatctatcgtatttttaagttctcttacatttccgtaccatggatatccttgcagttcttcaattagttcttgttcaattttgactttagggtccgatagtgtgacaaaatgtttagctaataattcaatgtcatttcggcgtgtccttaattcggggaggtgtataaagagtactttaagcctatggtataaatcttctctaaacatattttcttgaatcattttcagtagatccttattggttgctgcaataatccggacgtctattgggataatttggcttccgccaacgcgcataatctctttttcctgcaatactcgaaggagtcgtgcttgaagtttcaggctaatatctccaatctcatctaaaaaaatagtgccaccatttgcttgttcaaatagtcccattttcccgcccttttttgctccggtaaacgctccgtcttcataaccaaataattcactctcgactaaatcatccgataaagcactgaagttaacagcaagaaaagggccgctatttcgctgggaagcattatgaatagcacttgcaaataactcttttccggtaccactctcaccctcaattaatacagttaaatcagtcttagctaaccttttggcaatttgtttcgtgtcttggatcgtagagctaatcccaacgatgttatgaaaattgtattttgctacataaccttttttgacaaattcttttcttaatttacgttcaaacccgatggtcttaagggcatttctaaaagtaacaataatcgattgatcatttatatgtaggcgttctactattacatccgagccgtttacaacaaatattccgctttcttgttgcttattcaaaaggatgaagtttactaaatcgatattatcaataatggcatcaatcggatgaccaatagcatttttactttttattttcagcatgctttccagaaattcattaaagacaacaattcttccttcataatcaatagctagtatgccatcaccaacaccatcaataacttgatgaagttgtcgatgagctttagctaaattctttgttaaatctactatttttcgatagtatctctcagaaacgtggttacctgattcctccattaaatgaaatcgatctagaatggacatgattgtagtaatatctattaatctgtgaccaatattaattactttttctacaaaatcagggataatttcaagttcgccaggtgtgattgcgagcttgatcatttgtatattcgtttttccaggatagtatggaaaatattcaatgtggtttagccccaattgacgcatcgtttcaattgattcgtatactgtttcatgattatcattcacatatagggcttgtgttccttctggtaaaaataaaagctggtccacgttttcataatttaatgttcgttttgctattattacttcgcagttttccccaataaagtctttcaccgtttctatcgtaaatgtattaggtaacacaattaatgtagaatgaaatacttttggaatactttcttctacagaaaaactttcgatatctatgagatcatctaccatctccgttagttgttgatgtagggcttttcgtgtttcttttaaaacggtgatcaatacaatgtggttggtttcaaatttgttcatagagcacctctttagttgaatggaattggtctaaagttggttattaattggtcattatgtaaccaattaataaccaattataatacatttcagcatagtaaacaccgataaaacgacaaaatatttaaaaatatgtaaataatcactttaatttcgatgttggcacgatatttgcttatatcaatggtgtgtaaagaaataatgaaatgagtagagtcataatttacatatttaattctttaccacttgctagaaaagggaggttaagagtatacaatttcagcagagaaagacaacgaaaccatttaaattatgaggtgagagaaaatgaaaccactaattggtgttacggggtattatgttgatcatagtgaaatagggaaggagggcttacgagggctgccaggtcaagatatggctatcttttcttacgactacatccgttcacttcaacgagcaggtgcaacggttgttctacttccaattgaggaagttgatcaaattgagtccacacttaatcaattagatggattgttattggctggtggcgcggacatcaatccagtttattacggtgatattccaaaatcatatataggtactgtagaggaagaacgagataattttgaattaaatttggcaaagcaggctttagaaaaagatattcctattctaggaatttgccgaggattacaggtattaaatgttgcagctggtggatctctttatcaagacttagagcacgagatggggccagaatatttccatgtccgagaacagttccgtaaatggcaaggctctcattcagtagatcttctggaagagggaaaaatttatgaggctattggccaaaaatctttaatggttaattcttttcaccatcaagcagtgaaaacattagggaaagattttgaggcgagtgcatggtcctttgatggtgtaatagaggctattgaatcgaaggctcatcgttatgtagcagcggttcaatggcatccagaaatgatgtcggaaagggatgtcttgcagcaacgtttatttaaccaatttgtaaatgaaattagtaaaaaggtagttaaatcatagcgtgttataaataagagaattggtggatagcttggtacgtcatggtagtggggaaaccagactgctggctgtctgtaaaagtaataatcagtgggggatgaacgaaccccccactgattaaagtttcattctatctcgctttaacgggcagtaagacccccctcaaaattcagcgaaagcaaagagaagttagatgggggatcaactgcccgtaaaagccccattggttcaactaataatcattgggggaagaacatcccctactgattaaagtttcattctattgcaaaggggattggtatatgagtcaagtatcacaaaaggcagtttcattcgagccggaagaaaaaaaggaaaaaaaagaatggaaaataaacgtatttgcaatgttacttgtcttgttaggtattgcggctgtgattacacatatattgccggccggaaaatatgaacagattgaaaaaaatgggtatacaacagtagatccaaattcatttaaatggattgaatcaacgccacttggattttttgatacggtaaaatctattcctacagggatggtagaagctgctaatattatcttttttattcttattatcggaggtttttttggtgtattaaaggcatccggtacagttgaggctcttgtttcaacgatggcaaaaaaactcgctaaccgtgaaaagttaatgattcctattatcatgctgttctttgcacttggcgggtcattaatggggatggctgaggaagctttagtgtatgtacctctatttattccgctagctcttgcggttggatttgatacgataacaggaactgcgatggtactagtaggagcgtccgtcggatttacaacggcaattatgaatccgtttacagttgggctggctcaagggatagcgggtcttcctatgtattcggggatggggttccgcctcgttttattcgtagtcatatatgtaattgctgttacattcgtttatcgtcatgcgatgaaagtaaagagagatcctgcaagcggaatttacggaaaattcgatacaaacaagcaagacagcctactaacagcgaaagtagagttaacaaaaagacataaatggatattaacggcctttttaatcaattatattattcttgtatttggtgttattaagtacgagtggtatataaaagaaattgcagccttatttattattttaactataatcattgcaattcttggcaagatatctcttgatgatacagtagaatcttttacacaaggatcggcatctttaatcgggggagctttaattattggtgtatcacgcgctattttagttgtcttgaatcaagggcatattatagacccactactgtatcaagtgtcggaaggaatggaacatatttctccttttttaagtgttgttggaatgtacaacttccaagtagcgattcattttattttagcatcaggtagtggtcatgcaatgttgacaatgcctatcatggcgccacttgcagatttattggacattacacgccaaacagctgtattatccttttcattcgcggatggtattggaaacattatttttccgacaggtggtacgctaatggctggattagcaattgcaggaatttcatggacaaggtgggcaaggtggattcttcctttaattctaattgaatactcgatcggtttaatagcagttataattgctcatcttattggttatggtccgtcttaataaagactatacataaatataaaactgaagagactcggaagcagaattacttcagcacgattaggaagagcgatggtgcgagttgggaaagatggatattcgcattcaattattgagagttcggatttgaagaagattgggaagtgatttacgaaagggaatagaaagaatgaaaaagaacctaatttctctattttatatggagaagttaggttttttcgttttgaaatcattatgagaaatttcttatatatttctcatatattcatcatgcttccttcattttcttctcacgtctacgttttacaatcgtatgtatcaaaggtaaagggaggtcatacattttttacttatttcaaaacgaaggatagatggtggtgaacagatgaaaaagaataaacgtaaaaaattgcgttggttaaaatggattttgatccttccgttacttctgggattactattgtttggattacatagtatgaagtttgaaaggtggggtcatgagaaacataagcaagcagcatatacagtttctcacgataaagaaagagaagctttcgttacgcaaaaagaaaaatttaataactttgagcgagatcagcatcatgaaaaacaccacgaaaaagagtttgaaggtttattctttataccattcttgttagcgtttggatttgttcttttcggctggtacatgcttcgtaagtctgaaggaaatatggttaaaaagtggacaggcatattgctcctagttattggtgtattaccagttcttccggtgctcgcatttgttgcgataattgtttggacatataaaaaattaaaggaaaaaagattggcaactcatatagatgtatacagcgattttcaagtgcaccaacaagtggatattttagatcaatgggaaagaagtattcgtaaggaggagaagtaataatgggtattttaaaacgtattaaaaatattgtagtggcggatgtgcatcaaacgctagataaaatagaaaatccgattagtatgttaaagcaatatcttcgcgagacagaacagcaaattacgaaggcggaaaaagcactttcgcatcaatattatttagaaaagaaatatgaagcattaatttcagaaacgaatgctcttattgcgaagagaacgcgccaagcggaacttgccgtatcacgtgaagaagatcatatggcgcagttagctttgcaagaaaaaattgtgaatgagaaaaaagcggagttataccgccagcagtacgaaataacaaaagagcaaacagcgacgctttatgaacaaattgacaaactgcaaaagaaatatggagaattgcaatataaagaacttgttcttgtttcaaggttaaatgcggcgcaagcgataaaagaaagcaacagagcgattgattcgttccatacagaaagtacagcgaaaggttttgcacgtattgaatcgtacgtacagaaattagaagcagaaacagctgctagcaactacttttacaatatgaagtctccgaatcaacaagaagtgttagataaaaatttacaagaagaagtgcagcgggagttagagaagttgaaagagaataaatagtatgcaaaaagcccatttcatatgggctttttttatcgataaaattatctattcttttccaaactgaaaaatatcccgattaataagttggtggagatacctatccatttcagcagcagaaacttttctttcatttttaaaccaccatgcgcttaatgaggtgattgcccctgaataaaattcaatgattagatcatttggcatcgtatgatttttgcgcagttgatgtaacgcttctatttcttgttttctcgtttcgtgacttaaatactgtgtccggttaataaattgttcatcagacatttgtgtttctaatattttaccgatttcttcatggtgtagaaattgttccattacttgaaatggtttacttaatcgatctgaaaccggtattcccgcaatcatcttgctgtatcgtttaaatccaaatgctaataaagcatctttatcttcgaagtgtttataaaaggttgttcggtgtaccatcgcacggtcacatatttggttaatcgtgatcgtactatatttctgttttgattgtgtcattaattcaaataaggaatcccatagtaatttatgtgtacgtctaatacgtaaatcaatttgtttttcattatcgttcatctacaattctccttttttgtagattaaatatacagtggctgaaaattgattctccctttttaatctacatatgtatattatattacatgtgttctggtgtatttaaagttttttagtaagaaacaggaggagaatttgcaaatgaatatgacaactaagagcccagcaagtggcaaagttgatacttctaatatgaaacatacccctattttaattgcattacttttaggggcaatggttgcattattaaatgaaacattacttggtaatgcgttaacagtattaatgaaagaatttggcgtaacagcttcaacgattcaatggctttctacagcgtacatgttagtagttggggttttagttccaattacagcgttacttcagcaatggctcacaacgagacaaatgtttttgatcgctatggtaacgtttttagctggtacattaattgcgggatccgcaccgacattttctgttttattagtcggccgtatcgtccaagctgtagcgacgggattaattacaccgttattaatgaatacgattttaatcatttgtccacctgaaaaacgtggtgccacaatgggattaatcgcacttgtgatgatggcagctccggcaattggtcctacattatctggagtaatcgtagactcactaaattggcgctggttattctatattgttattcctgtcgtgatcatttccattatgattggaatgaagtacattcaaaatgtttcagagttaacaaggccaaaagtagattatccatctatccttttatcgacactcggatttggcggacttgtgtatagctttagtgcatcgggtgatttaggatggtccgatgcgaaagtgtatggcactttacttgttgggcttatctcattatgtatttttgtcgtccgacaattaaaaattgagaatccaattttagaattacgcgcatttaaagtctcgatgtttacattatcaattggattaatcgtcattgtgatgatgtcgttattttcaacgatgactttattaccgatgttcctgcaaacagttttactcgttacagcttttaaatcaggaatcatcatgcttccgggaagtgttattagcgccataatgggaccaatcgcaggtaaactatttgataaatttagtccgaaagttattatcgttcccggtattgtgttagtggggatagcaatgttcttatttaaaggcattactcctgatacatcaatggtacaaattattgttatgcatagcgtattaatggttggactcatgtttgttatgacagcacaaacatacggtttaaatcaattaacaccagatttatatccgcacggaacagcactgtttagtacactgcaacaagtagctggcgcaattggtacagctatattcatatcgaaaatgtcttcaggaacaactagctatatggaaagctccgcaaatccactggatccagtagagaagttaaacggtttaacgtctggattccaaggtgcatttgcactagggttagtctttatcattgttgcttttatcgtatcgttgtttttaaaagaggagaaagagggagtaaaggcagcgagggttttacagaacgaacattaaggtttatataaaaaagacatctttccctaaaaaagatgtcttttttatatttttttcgtaacacttgtttttgatgtcttaatacataagaattggtatgtaaaatatttgtattttttgaacatgaataattattgagaataacgatgcaaagctgtgctaataactaaaagtccaataatgagagaaagagttcttataataagttctgccactaatagttcaccaaatgatttagtgacatcgtatatagatcctgttatgagaataggtgcaatcataattataattccaattattatttgaagaagtagattgatgtttttattcaagacaatcacctccaaaaaaatagggaatgagaatatgggtttttttgtattataaaatgattatatcgtattacattaaacgatgagaatatttttaaatagtagaaattagagactcttcaataaaaaggaattaaatatggtattctttagttaagatatgtaaacgaagacgggggaatgaagatggataagaagctaaagtattggctagcatctattatagggggagtagtacttgcaactggtatgacttatggaatattacagtttgctgaagtcccgcttaagggtgaggaccatgtttttgcagaggttaataaagaagacatactatcgaatgaagcagaagtgaaaggttcaaatgcacaacttcacattacagtaacttctactgaagaagaagttatttcagctatgcatagcatgactcatcaaaaagtaaaagcgtgtgaaggaaagggagcaacccctatgtccaaaaagaatgcagagaaagtaagaaatattctaaacggaaacaatttcaagaacaaagaagagctattagcaattactgaaagatgggcaaatagagattttagtaaaattgtagaagaacataactattttattaaacttcaaggtggcaagataggtgaagctacagtgatggataaggtagacgagcaagtattctgtctcaatactttcggtgatgatgtaacggccgcattaattaaatcaggagatcttcaagcgctgtaaggtgttttttctctgatataaagaaagcctcaagtattcatatacttgaggcttttccaatggaaagataggaatggtccgaattctttacattaagaacaaagtggaattactcctaaaccaattaataaagctgcagcaactgctggaattggtacaggaatttgaataccttctacaaataagaaatattgaccacttactattttaaaacaaactaattgcatggctattcctcccttcttttaggattaatacattatattaatttatctatctattgatatagttaaattatttatttttaaaaatatagttaatatgtgaatagtcttcgaaaggacctgctcaatcaatgcggaaaaacataagatgaaacgaatccattaaaatacatgagtgaaccttagttttcccctcttatctaaaggaggaactattatgggttatggtggtagttgtgttattcattttattaatcatcgttggagcttcttgcttctgctaaaaactattggaaaagacactcatatagagtgtcttttctttcgtgcaaaatgattcctgacaatagccaactgtataaagtatacggtatacttttgcctcattagacatataaaaatgttggagggatgttatgaaactagtagggaagcacatttatattcggctttataaaactgctgatgctaacgagttagctaacttacatattagaaatcgcgaattttttcaacgagtttgcccgttgctcccagaagttttttatacagaagaacatcaaaaaatacgtcttgaacaagctctaaaaaagacagctgaaggacaagtatacccttttggaatctttttaagagaaaatgataaacttatcggagacatttcattaactcaaattgttaggggagacctccaaagctgttatacgggattcactttagataaggagcataatgcaaagggctatgcaacagaggctcttcaacttgttgtagattttgcttttagggaattaaagctacatagaattgaagcaggagcgatgcttgataatatagcatctattcgtgtattagaaaaagtggggtttaaaaaagaaggtatagcgaaagaaaatataaggattaatggcaaatggacagatcatcaaatattagctattatcaatagtttggatgtgtaagcttattttgattccaataacgataattatgtaaatacgaaaccccttcagcaagtaaactgaaggggttttttctagatacattgaatcccgataagtgatgttatggtaactaagtctttgtaagtattgtcactatggtataatatggttaattatgtttgtaaaaaggagaaatgtttaatgggagtttttacagcattgttagcaactagctcaattttattagtagcttgggttgtaggtgaaagagaaaaacaaaatcaataataatattttatatttatggatgaattaattataaaattaagaggggtttgggtatgggagacgcatatgggggactaaaatattttggttttttacttgtattagtatttagtgcgggatttattatacgttggatttttcgtgatgtaatttcgttagatcaattacttggtttaggtataggaattattacgttaataatggcgttttttataaagaaatacagtaaagagctaaatactaatagttaatttatgttttctttggatgagtatctcgatagtgaggagatactcatcttttcttatgagggattcaacttctttgtttataatacttcgaatgtatacttttattttatattttgagagtatcagaagatttggtgtgaactcaatgtttaaggtaatttaaaagtttactttcaggaataacaaaaaaagagtcctatattaaaatgtaccctatagaatagacacttgaaaaaagtctattctatagggtatttgaaaatgtacatatttattcaagcgttaatgtacatatttaagttagcatttatagggggggaaagtattgttatctaacttatttatttggatttctttaatactatttataattattatgaaaagtaagatgcgactattatttaggattcctatagctatctttatagctttgctaattttgtccattggtgctatttatgaattatatcccaatttggagaaaattcaggatggattagaggggaatcaagaaattattattagatgatgttccaatatgagaagaattaatatgtgaataactgcatgaatattataaggtgtgaaatacgtgaaagatcatttcgttacacgaagtgatctttctttttttttgcgtaaatccaataaatatatagaaaaatcgggggatacggaaggacggaacgaagtggagcgaacgacatttttttcgctctttgagcaaaaaaaattagtaatgcaggataagggggacgccacatacgtggctacaactaccaggcaaagcctggtatatcatggttttttcgtgaacacatttgtgttcattctactttaataaaatgcttttatgtgggaacaaaatgtgatactattttactagtactaaataactacgtagcaacaatgtatggtggtgataattattcataaaaataaaaatagtaggtataatgacctactcagagtccgagttccaacagatttaaaagcgaaattaaatgcggtagcagaggagaggggagaagatacagcagatgtagtaaggcgtttttgtgaagagggattacacaggcattatgcagaaaataatatggattttattaaagttgaaatacgagaagctttaagagatgtactgaaaccttcggtagaacgtcttgcgaaaattggtgctaaaggatcagtttcagcaggtacagcgatgtatatgttagttgaatcattaggtagacagaatttagatgttaaagacatatattctcgtgcacggattaaatctgtagaaagtttaaggtcaaaaggagatattgatgaataataaattactaatgttttaaaatttttgatttgatttattgaaaggtataaaaagaagtatgaaagctccatttatcatgaaaacaagtttttatttacctagcacttctaatgctaaaaaaaatagtgcccatgttgaatacataggaacaagaccaggcgtaagtatggaaacaacaaaagactttgaagagttagaagaaaaaacagatgccgcacatcatgcaaagtatgctggggaacgccctggatcacatggcctttttacccaaaatagtaatgaagctctcgttttgaaagacgtacaaaaagaactaagagagcatgacggggttgtttggcgaatgatacttagcttaaaagaagaagatgctttgaatctaggatttacggagaaaaggaaatgggaagatcttcttcgttcgacagttccagatgcagcaaaaaaaatgggtattacagaaagtaatttgaaatggattgccgcctttcatgaggaaaagggccatccgcatgttcaccttatgatgtgggaaaaagagactaagcgtgaaagaggggctttgtctaaaggggaacatagagatgtaaaaaatgtatttatgaatgaaatatatcgtgaagaaaggcaggaattaaatttaataaaaactgtagaacgtgatttcattcgagagttcgctttagacaacgttgtagatgcagtcaaaatgttaaaaggtttagatgaagtagataaaacacaagttggcattgcaccacgcatacacacgcatgatattgaaaaattgcagaagtctctttatgaactttccaaaatgttaccagaaaagggccgtatgagttatgcatttatgccagatgaggtcaaaaaagaggttgatgaaatatcaaattggttaataaatcgacctcagtttatggaatctacagaacgttatttatcttccgtagaaggtctaacaaaattacattctcatgatcctgaaagaatagaattagcgaaagaaaaagcaatgaaagacattcaaaaaagagtttcgcaggttcttttaaagggtgcattagagacaaggattaattttctaccaaaagttgaccaagaaaaagcgatgaaggcacaaatgcaatttataaaagctaatggtaaaccgaaacaagatcttagttatgatgtgactaaaaaaagtgcagcattattaaaacatttatccttttcggaaaatgaaatcaaaagggtttttgaaacctggtcggagaaagcggatttggggcttagtgaaaaagaaattagcaaaagtattgctaattcatcaaaagaagatattaaaactattgatgaaaaagacattaaaactggagctgaaatactaaaattagcaggttggacaaataatgaaattatatccaagttaaatagatacgatgacgttttagatgggattgaaaaagttttaaataagatcgaaaaaaaagcgaactctaactttgtatcgaaaaaagattttagcaagattgaggaaataacagatgtatctgtggattatccatataaattagtagaacgcagtgaagtttcaaaagaagatgtggataaaatgattgaaacattttcgcaaggtatatgcagggatgaagcggcagctggatggacagcgttttgcatgagtgttgccctaaagcaaagtgaagtttctgagagtaaaagaattgatgttgtttcagagtggattcgttctaatgaaatagcaggagtagatttgtatgcgattaatgaaaaaatcgaagaaggatctaattttttacgtaagaatacatgggataaagtattaggaaatataggtgttaaaccagaagattttaaatacccattcaagacttttcaagaattagagtttgacgaacaaaaagctgatgaaactttattgcagttagaaaatattgtagtcgaaaaaatggaagtgccagatagagaacatttaaccgaggtctatgcaaggattttaagaggcgtggcatctgacaattcgttatttaaagaaaaaataaatgtttgggctaaaaaaagaaagttacctcaaagtttagttactaaggtaataaaaaaatatgaaaaaagaacgaacgacattgaatacttaaaaagacctttaagagtacaggatatgaccgaaaaaactattcgggattacagtaaggttctatttgctacaggcatgtcagaagaaaaggttaaagataccgtacttgaatggaatagacgggtgaaaagtaatgctccacccgaaaaaatcgaaaaaataattgaacaagtaggagctcttaacgaggaaaatcaaagatggggaaaagcaacctatgtaaataaagagagttataaacaattaaatgagactttaaatgttaaagctccatatatttataaaatgccatcattcaagaatccgaacgcttcaattaataagatatggaagtcattctggaatgagttagaaaaagagcgtatgaaatcagaaaaagaaatggaatatgcaagaaaaagaatgatgagagcaaaagaacaagaacaaaaacaaagacaagaaagggaagagagaggttgaaattccgaatatttttagttgtttttgtgattttagctgatttactaatcttaccaaagattgtatataatttagaccttttatttaagggaattgatcttcaaattgttattaataatttaactacattttccgttatatacccatgggtaattttgaagcaatcttatggaacattttatttaatattacagggttttgttgccacagctattgttttgattatctggaaagaaaatagaggcataaaaaataaaatgaagaatggtattggcggtccagaggcatccggtggtgggcaatttgggacaagtaggtggcaaactgaaaaagagagagatgctaataatagtgtttggaaatatgaaaaagaacctataaaaacagctggtatagtcctgggggctgatttaaaaaagaaaaaagtatggcttgtatcggaagatgaacatacattaattatcggtacaactggttcaggtaaaacacgaagaattatttatcctgcaatatggacgttagcaaaagctggcgaaagtatgattttaacagatccaaagggtgaattatatgcagcaaccaagaaattcttggaagaacagggttacgaagtaataatgttggatttccgtaaacctaaggctagtacacatcattggaatccaataaaagctgttgtagatgctttaaaggaagatgatgaatcgaaagcttctgaagcagcatggaatatagcaaacatgattgtatatcaaaaagagcgtacgggcgaccctgtttgggctactggagccgaaagtgttattgccgcattgattttatatatagccatagaatcaaagaaagatagtcaaaagcatatggctagtgtgtttcaattgctagttgagtatggggtagttaagaaacgtgaaattggcgatgggatgatggaggaatatgttcccttattggaattgattgaatcgttagaacgaggccaccttgcaaaattagcatttgctacagctggtatggctcctgaaaaaatgcgtggtagcttctttgcatctgttgcagcagatttaagattatttgcagatccttcaattgcatatatgactagttttcaagatcacgatttaaaacaacctggtgaaaagaaaacagcaacattccttattatccctgacgaagttaagactcgacatttcttagcaacgttatatatagatcaaacgtatttcgagttggttaatttggcaaattctagaccagagggacgaattgcaataagaactagctgtttacttgatgagtttggtaatatgccgagaatttcagattttgacactaaaattactgtttcaaggagtaggggagttagatataacattgttgttcagggattggatcaaattaaagaaaagtatgggaaattggctaatacaataaccggaaactgtagagtctggttatacttgttgactggtgataatgaaacagcagaagttattagtaaaaaattaggaacatacacagttgcaactgatggctattcagctactactagaacgaaagacttttctgctagttattcacagaatctatcaaaacgtgaactgttaacacctgatgaagtaatgagatttccagattttgaagcgattgttattaggcaacgtcaatatgctacaagagtccctactcctgatatttcgaagtatcctattaaatttatacccattgaaaggggtgatttggaaaagaaagatattagatttgatgtatttgatccatttaaagcgcaatgggaaggagaacttgaagcaatcgaaaaagctaataagacaaatgatttagaagaaactgctgagacagaagaatttgaagaaacaatggatattacaaatgaaccaatagatgtagctgaacaaaaagaaagctatatggacattatttaggaggattagggaatgaaagaaaataaagatttaaaaatgaataaaggtaaaaagaaaaaaattagttttaaacattatttagcttttgcattaccatatgtattgtttgcagcactgtttgtaattgatacttcagcatatgcggctggggagccaaagatttattctggtactaaaaaaatgattggtgatgctacaacatggcttatcgcactagttcctattgcgggtggttgtatggttgcttggcaacagtttaaaaagcaaatgtctgataatgatccagctgatattgcacatgcaaataaacgtactaaacagattttagttgcaacagcaattggtgtatcggctgtagggttaattaaatggtgggctagttactataactaagaagaaggttaaaaaacatgggattcatattagataagatatttaacagttggattaatggagcaattgaatttttcttgaaaataattgccgaaattgccggcgtatctgtttatgtattagaactagatattgtaaaacaggccataatctatacgcaagttattgctctatcctgggttgtagttgttgttgcattccaagctatatacacttatatacttagaatgaatggggatagtggagcagatcctatggcacttataaaaggttccggtcaagcggtagcagttatttgtacgattccttggattgtatcttatgtatataaatttggtacacagatggctgttgatgtagctaaattacctggagccaaatgggacaagagtactagtgaaataaagcaaacactggatttaattgcaaaatcaacatctgttatacctctatttgtattattatcggttatcgtggctgttgtagccattattattgttcttatacaaacatctattagagcagctgaactagcttatgcagctgtagcgggtccacttttggctactggattggttacaaattcagggatgtattcagcttggtggaaagatgttttagcgatatcattagcccaggcttcacagctatttatgttaaaacttagttttgaggctttaaaaacaatggtatacaaagattttccgattatgtcgttattcctattcttggggattctttgggtggcaatcaaagtaccgaaaacccttcaaaattgggttcatagtacaggaacagggagaatggcaacaggtgtagctcagcaggcagctacagcagttataatgagaaaagcaatgacgaagggagcttaatatctatggaagatagagagtttgagaatccatatttaatccctaaaaacattaaagcacgatttgaattaatacctggttttgggtggcgagaaattttcgtcaccttagcaggtgcaatagttggatttatgcttttactgttattaggagttttcggaattcctataattgttaggatattcctcgctgtaatgtgtgcaggtataggatatggtatatcggttcaaaatccacgtactggagtgaacttattagatattttaaaaatgatgaggcaattcaatgcgagacctaaacgattttattacgtttttggtgaagggagagaaagagattaatgagtctttttaagagtaaatctaaaaataatctttcaccggagcaagttgcaactcaaaaaaacaaagcagttgctcaacagtggatgcccgtgatggatattaacaatgaattgcttcatttgaaaaacggttcgattgtaggatttataaaagttcagcctttgaatatggatttattatcaaagaaggaacaacgaagaaaaattaaaagtttaactgaagtttataacgggataactcgtggtcaacaaacattaactattgctagaccagttgatttagatggttatatttataggttacaagagaaaaaggcaaatgaagaaactccagttaaaagaaaaattatagaacaggatattaagcgtgcaattatgatgtctagtggtggtgaggcggtagaacgtcaattttatatcataatatcaagccgaaataacaaagatgatatggatcaggatcagttacgtagaacatgtaatgaaattgcacaagaacttaaaggagcaagtttatccggacaagtatgtgatgatcaaatgattcgtgatttacaattcttatttggaaattcagcacaatcttcagtggaaagagcaccaatagataatggcccatttatacaagctttttataatggtaatgatactgtaaatgatgaggaaaatgagggagcataaaatatggcgaaggtaaaagaaaagaagaaaaagattgctggcaaaaatcaattgtcaggattcttagatgtaattacacctagtgtgataaattttcagcctaaacaattaaactatggggatagatttcaacgtgtacttgttataactgattatcctcaacgtgtaggggaagcgtggctaagtcgaattgcaaatattcctggtgtagtaacgtcaatgcatacggaacctattgacccatatgatttagtaaatgaaattcgtgtttctatgggtgaacttggagccaaaattgaaaatatgggaaatccagtttcaagagaaagggcacaggatcaatatgatgatgcaaaggcaattttaaaaaagattgatagagaacagcaaaaagtaatgttaatgacggtggtacttttagtatcagctgaagatttagatgaattaaatacgagatgccgaagagtagaaagtatgcttgcagcagcagggttaagggcaagaacaccgatgtttctacaagaagaaggattaagaactgtaggcccatgggggatgatggaaaatcgaattaaagatataggagctagaaatatgccagctgagtccgtagcagcaggcttcccatttgtatattcaggtcttaatgacggtgaaggtattttattaggtactgataaaggtggagggattattctttgtgatttctggactaggcgagaaagtagaacaaactcaaatctaactgttatcggccgcccaggtgtaggaaagagtacagctgttaaaaagattttgcgtggtgagtatggtcgtggaacaaaaattatcattatagacccagaagatgaatatggtgatttagcaagaaatatggatggggatgctattgattgtgggggatcacaagaaagtcgaataaaccccctacagataagagatgtcccattagatgataaagatgaaaaagaaaagttatatgaagaagttgaaggaaataatagtggcccattagcgtatcactttcaattcttacgaacatttttcaaactatatttaggtaatataagtagaagagatatgagtttattggaagtagccttagaagcattgtataactcaaaaggtattaattgggctactaatccacaagacatacctaatgaacagtatccaacattaaaagatttatactttatactattagatttatcgaaggaaaatgtggaggaacttacaaaaaaatggggagacttatccaacgtttctctaacgggtgcaaatagcaaggattggcttgatctatctattttattaagatcagcagcggtaggagcagattcatttttatggagtggaccgactacaattaatcctaaatcagattttgttgtattaaatattaagaacttactagaggcgaatgatgagattagaagggcacaattttataatgttttaggttgggcctggaatgaggtttcaaaaaatagaaaagaaaaggttttacttggtgtggatgaatgttacttattaattgatcctgaagtcccagaaacaattaagtttttacgaaatacctcaaaacgtattcgtaaatatgaaggcggtttaatggtaataacacaggatttagtagatttcttagatccagctgtaaagcgatatggacaagccttactaaataaccctgtatataaaattttactaggacaaggtgaaaaagatattgaagcattagaaaaattaatgactttatcagaaagagaaatacatacattatcagaagggaataggggagaagctctatttattgctggtaatagacgaatgcatttaaaaatagatatttctccagaagaattaattatgtttggtgaggctggaggccgttaatagaattaaggtgaaatataaatatatttgttcttaaaagaacgtagagtttgttttattaggtaattattactactctatgttctttttagaacgttttagaaggtgaaacggtgatttacttaaaggcagctttacttttaaaagattattggaaaccaattttgatggtcttgataactgggattgttttagtgttattaggcccttttcttttgctaacatcttcaactccaggtggcaaagaggaaactattaaaaaatatatagaggtagcaactaatttacagattaattgggtagaactggtcgcatttgatatggtcaagtacgaaaatcatttagacggaaaagatcctcatgattcagcttatcattttataaagcttaaatatgaagaatataaaacagaagaaaaatgtattaaaacaaacaaagaaactggtcaatgtgaagagaaacaaacgcaagaaatagttacatctagtaaagaaattaaagggaaaaaggcagttcaagatttttttgcgaaatttaatctttcaggaaatagtataagtaacaatataaagaagattagcgatatgcctggaaaacgtgtaataagttcctctgtaacattagatgaggcgatggatgatgctaagtttacaaaggaacagaaagaatatgttaaaaagctgattgaagcaggaacaatccagcagatgtttcccgatgcaggtacaggaacaggagcggtgtgtacaccaagcggtactttaaataaggaattaattcgtcaacagatggataaagcggggaaatttaaaggaatgacagatgattttataagcatagcggaaaaacataagattgatccagttatttttatttcaatcgcatttcacgaaaccggaagaggaacatcaagggcggttcgagagaaaaataatcctggaggaattatgggaagtggaggactatggactttttctactttacatgagggactagattttatggcaaagaacttatataaactatacatatcacaggggttaacaacaattccaaaaataggtgctaaatatgctcctgtgggtgcaagtaatgacccacagggaatgaataaagattgggtacctgtaacaacacaaatagcaaattcattgggtggactaacgatgaattgtgaagctggaaatcaaggtggaggtatagttttagatggaagtggcggacaaaaatttgatgctaataaagtatatacatctatggcacaattccttggaagaccttatgtttgggcaggtgctaatccagcacaaggttttgattgtagtggtttaatgcaatggaattttagacaggcagctgggataaatcttccacgtacagcgcaagaacaatataatgccacagcaagagtaaataaagaacaattacagcctggggatcttgtatttttctacggcacatacgtagggccaaaagtcacacacgttgggatgtacattggaaatgggaaaatgattaattcaaacagttcgggcataaaaattgataatgtatttgaaggatattggaatagacaatattacggtggtggacgaattgttcgttaagtatctaaaaggagagggacaatttgaaaagtagagtgattataagtgtggcagtcatattatttatgacggtttcttatttatttatatatacttatggggaaaatcgaaaattaaaaaatgaaattgcgaaattccattcagaagaagaggtaaaaacagaaatgaatggatttattaaagagatgtctgaagggaaatccgaggaatttgaaaaatatttgattggtgaagctaaaaagaattttttaagtataaaagaaagaaagcaagaagatttaaaggttaagcaaacagacatccaagagcttagggcaatagcgaaaaatagtgaaaaaactaagattacatcttatgcaacatataggactacatatgatgtaggtacggatgatattcaatccatttatgtacaagctattagtgtaaaggctgagtggattaaaactgataccggttggaaatgtgagcattatgaaattcatttgtagaaaggtagtgtgtaaggatggatggtattatagcacgtcctaaatttgttgaagagataaaagctgctctcgaaagagaggctgcttttataaaaattggtgaatttgaagaagatagttttaagcaagcttgtttttcagcagctcaggtttcgttaaagctacttttaattgatataggggttacagatagtgctagtttgataactggaattaaatctattcgtgctagtaagccatctataagaattgtattattagcgatagataaagagccaggcgataaaacggtagcagctgttgtgagtatgggcattacagatgtaataccgttatcgactgaaactatagatgaaaaagggaaggagcgagaaaacttcacgcctttaatagaaaagcatattaagaggaatacaacatatgctgatgttgttagatggcattatgaagtaggaaatgaattttctacttctaatgaaaagataaaaaccaagatacttacaaaaaagcaggttatagagaaaaaaatttatgaaacaaaaaccgaggtagtatccgttgcaaataaaaatatagcaatatgcggtttaagttcgaaatcaggtagtagttttgtgtctatgaatcttgcaatggcaatgagtgattatgatctagcaatttctatagtagaaccaccaataaatccgtatttttttgatacattgttactacatgaacacgaagaagaggataatcaattcatgtcaattcctcacatgattaaacaaaatgaaatcggaaacaaggagtttaataataaggtctttgatatttattggaatgtagctgatactagaaaaagtaaaattggtgaatggggaattaatgaattaataaaacaaatacattttgagaaaaaggcaattaatattgtagactttggggagaatgtaccactagatgcatttagctatatggattatatatttattataatagatcctcaaccgtatttaatcgccaaggaaatagataaagtaatgaattttgtaaaattaaagcaggaaggccacccaatatattttatctttaataagatgaataaaggggtagatggtaaaggtttatgtaattctctaggattagaaggggttataaatattccacatatagatcccgtaattacatataactgtctatacgatggtaggattccatttgagcataaagatatagatgaagaatttgtagatagtatggatattataataaaagaggttataggtaataagtactataagaaggagaaaaaaacttctctgtttaatagattttttaagaagtgaaatatagtgaatttaatttaatatttataaaaaaagaattggaatataggttgatagtcctggtgaacacctatatttcagttcttttttatattgataaattttatttgtaaaaaatgtgtacattaattttaaatatgctataatgttcctaaaggaacattattagtcatatataactaataaataattttttatgtagttacaaatacctaatattgatgttgagtagttgggggttggtacatgagtctactcatagtttcgctgtttattacatatatgctctttaacatttatacagattttctgtacttaaaaactaaaggttactggcatcttatatttttagttctttgtatctgtctgggcgtaataacacatataaaattattagatctaatgtgtgtagtttgcgtttcactagttgtagggatattgcgagagaatatgaaactaattcgtttttctcctggtgacacaaagatgattattgttgcatctttgttttatttcctaattagtccagaggaaggcgtattatatacagcattaatagtgcatattgcaattttcatgtgctcatcaattttgacaggatttattactttgttattgcttttcaaatcttttatacgatttaaaacaataactggatatcacagtattaaatttaaaaaaatgaatatctcgctagtgacagatgggtggaaggtaactcgtatgtactattgtttgccagcagctatttcagtgctagggggtgttataccattaattctaatgtcattgaaataaatgaatgcattgctggttttacgcaatgattgtatattagaataatggaattaaaaaggaggaaatttataatgaaaaagaaattattaactacagcaacagcattgactattatggggacagcagttttagggacaggagcttcagttaatgcggctgataatacagattcattaaaatataatgatgttccagcaaatcactggtctacgaaggcaatttacgatttaacaaaccgtaaagtagtgcaaggttatggaaataatgtctttggttttggtgacaatgtaactcgtggacaagtagcacgtatgatttatacatacgtaaaaccagcggatgcagatgctagtttcaaaaatccttttactgatattaaaggacatttgtttgaaaaagagattttagcagttgctaaagcaggacttgtgaaaggatttggtgatggtaagtatggaccagatgatatcttaactcgtgagcaaatggcacaagtacttacaaatgcttttaaatttaagggtacgaaaacaacaaaatttgcagatgttgataaaaattcttgggcttatggtgcaatcagtgcattagaagaaaatggagttacaattggtacaggaggtaatatgtattcaccacaaatgcatgtaacacgtgaagcatatagtcagttcctttataactctattaatgtagtagaaaagaaaaaacctgagactaagccagaagtgaagccagaggaaaaacctgagactaagccagaggtgaagccagaggaaaaacctgagactaagccagaagtgaagccagaggaaaaaccagaaacaaagccagaacaaaaattacctgaggggttaaaccaggagttaacaacaccagaaacaaagtttaatgaaacagcatttaataatttaccgattgctcaaaaatcagtttcaagtggcgctcaaaacattgttaaatctgtcaattctacatacggtacaaatttgaaatttaatgaaattggtgtatcagtagcacttaaagaccagggaatgtatttaccagcaggtacatttaattcacaatttttagttgaaggcgtaaataaagatgaattcgaaatttactttttaggaaataacgctgcaactgtagaacttgctaaacaatgggttaatctattaaatccatcacttaacttagattcagagattgatagtgtagtagcaactcataaaattagtaactatgaaaaagaaaataacaaaataagaattgggctatcaacagcggatcaaatgctttatatccgtgtagaatctaaataatttaaattaatttatggcatacgaactagataaaaataaattaaactagttcgtatgccaccaatacacgaaaggaggaaaatcgtgtatagagtaagacctttgttgtttttattgatatttatattctcgttactagttcccaatgcagctagtgctagaaataatgatgttccattctataatggaactccagatacggaactaacttctaggcagttacaaatacctggtaagttacttcgaccaggtaaaggatatacacccccaggaagtgagaatatatattatacagctgacatacattatccagcattgtataatggtgcatttaattttggtaatcatcatgaaaacttgattaaaaacactgaatcttcagagccttttgtcaatttaattaatgatggagttatagggagtggaaatcctataggtaatcggatggtcactgaagtggaaagaatgaatgcttctatagtatccaatatttattttggtaatggagattttgtattaggtaatataaataaacatactatatcccatgaagaaacaggtaaaagatatggtaatttttattggataagagatatagcttatttaagtgggggatatgctggtgcaggtttaagtagggaaattaatccatataacatatggattgtcaggacgagtttcccagatataactaaattcagtgcaacaaatggctccaaatcaaatccagtgttttttgatctagagggctatgaatatgtttcaaaaaacaaaggttacacagataatgacccgaatagtaccacgactaatccatacgaagaaagtgctggggaaagaaaccgggtacattggttcttagaaatttataaagatggggatttggtagataagaaaaacggatatatgcgctcgaaaccaaaaagtaatccatctaaagcgaatgagaaagaatcaggtcactttgtaaatgacaatgtgaatccaatagggtggcaacctgagtcgtgtggaagatttactgctaaaataaaggttctagatggtgttcaaaggacttcccaggaaaaaacaattacctttacagtcgatggggattgcgatgataaaccaactactaatccggatgataatatgtgcaaagatgattttaagtataaaatggactttgctgtagatcgaattgaaggagaaacagcagaaaaaggaacaaatatttctactcctgtaaaagtatctagagccaattttaaagaggaaagggataaatataggggtgaattaaaagagaagattaactctctacaatcagaagtaaatagtcttaaagatgatagagatagtacacggtctaatttaaagtcatgtcgtttggatcaaacttgctatgtggatgaaaaaggaaaacagcattgttacccaagagattgttcatggtgggaagaacgtttagatagtattctattaagacttcagaaagcggaagaaaaattagaatgcgaaacaaataaattaaaacgacttgaaacattagaagctcagtacaattcaacagaacctaacgtcaccttaagttttgatggtgatagggtaggggcgcagaatgttaccttaaaggaaggagagagtaaaaccataagctttgattggtcattaaaaagatctggtcaaatagaagctgaaattaatccgataccacgaaaatatgataacagtaaagatgttaaaaagacgaactttaagaataataaactagatacacctatatacacatctagtcatcaagtgtcattatgtcctcggcctggagaaaaagctagtattcatgctgtagtaagaacaataaatgacaagggaacaaaggataacctctatgaatatctgacaggtgagataattaatttatccagaaaaacattgagatcgggatatggatttagttatgaggtgaaaacaacttattctaatgaagatcctaaaagtagtgcaacagggcctaaaaatacagattcatttttcccaacaatgactaagcatttgcaatatccaaaagttgatgatggatataaagtgcaaatggaaaagacggaaaattctgtaagtgaatcggtttggtcactcccaatgacatatgttgaaaagttttcaggtaatgtctttgataaagactataaaaatcacccagcttataatccaaaagagataattctaaatggtggtcgaaagtggtatacatcttttgatcaaaaagatgggaaatatgcttttaatattaaatcttataatgctggagtaaataaattaaacttatgtctaactggcgaagtgatgattgaaggttcatttattggaaataaaaagggcgaagatgattttattagaagatcagtaaatccgagtaatccattccctgataaggtgggatggaattggcaaggaaaagaaacaatgttaacaagtttaaataattggtggacaaattggaaatatccgaatcctaaagatattcctccaggttatcataaagaatcttataaaattagtcctgaaatttaccaatctattaaagcatataataaatctcatggattaaatgtggatttaaatagtgaattctttagcaagtttaaccttaaataacctaaaaagggtgatgtaattgagtgcccctaagtttgtaataatggctcttgtattgcttggatttacattgtttattgcaagttcaagttatttgtttgcagctgatacaaatgaggacagaactttagaacaggcagcagcaagcgctatgagccagggtattaatatgggacaggttagggtggatgaagaagttacagttaatgaggatgtagtaaaagaggctcttgtgagacagtatgtagagcaatcaaatctaagtgatggtgagaagcaattacatatatatgctcttgcttctcagccatccatgcttgctgtagaatcttataacacttttgatcttccgatacgtaaatacctaaaagaagaagatgaaaaagctagtgttcgacaatttgctaacattatatttgaagcaaaaaaattgaaaaaacctaattaataggagttggaagatgtgaaaaaaaagagtacgcctaagaagttagctattactttagcagcttcaataggattagtagttgcgattgttggatacgagaattatgccgtttctagcaaggtcaatttacaaaaagtatattttactaaggttgatattccacctagaaccaagataaccaaagatatgttacaagtacgtgaagtatcaaatagctccattccccctaatgcgattaaaaatccgaatgacattgtagggaaatatactgtaaatggttttgggttagtcgagaattcatatgtttttaagaataaagtggtatctaaagatgagcttccagatgcagctattttaaacttaaaaccaagtgaagtggcatttcctctattagtagatattgagacttcttcagggaatagtattattccagaaagtcacgtggatctgtactttaagggaacagttaaggataaagatgaaaaaggtgaggttgtagaaaagcctatctttggccgcattgcaaaacatgtaagagtaacagcggttaaagatagtaatgcagcaaatgtttttgatcctgcaactataaatgtggaaggttcatatcaggatagcttaaaagaagaagcgaaaaatcgccctatggcaaagatttatacattcgcagtgaatgaagaagaaaatacattgctaaatcaaggtacattaattgggaaaataatccctgttgcaagtggaacagcatataaaacaaatgttgaaaaaacagcagatgaacaaattgtaaaatggatacaaaaacaatcgtacaaagtgaaataagagagtgagggatagacatggggagtaataatcccaaaattatcggcgtatttggtatagagcaaaatattggtaaggctacattatctcatgcgttatcaaaaataattgcagaaaatcaacataaagtattgtttgttgagttagattattcaaatccttcgtttgccaataaaacccaaatacctcttggtgatagacatatgggaaaatttatggaagaagctattttgtataatcaattaaatcttgaaaattacatttttagaaaaaaagatattcatagtaacacaaaacaatttgattggttgcccagttcattggatttactagtttatccaaaggagtatcaagcatccgaatttccagattttcaaaatgatagcgaagaaattatcattaaattcgtagaaaaattaatgaatagaatcaagagtttagactacgatgcagttatttttaaccttccatgtgaaattgacgatatttttggattaccaatattacgtaaatgtgaatatgtgattaatgtattgaatggtagccctaaatatctatcgagatatatggaattaacaaatgtctttgaacaagctgatttacaatacaagaaatggatacaagtatttaatctttgtagtagtaatataggtaaggatatttacggagaattaactgagttaaatatttctgaatgcattccgtattgcaatgaacgagctgaatttgaatttgctttgaaggtgggctctcctataattgatttgcatttgaaaactatttctcgtcaacttggtttcttcattaaacaagaagaaaaaagaggtggcattaacaaactatggagatcgtaaagaaaaatattatcaatttagagaagtatggtcatagtccagggaaaaagaaaaaaattgatattgagaagtatatttatactattaaagcaagtaatagtataggtgttaatcatgaaaaggaactaccggaagaatatttaaaagaagtaaaagatttcttgaaaaatgaacataaatcattacttcaagaatcctttggtgatgaaaaaaagaaagctgcactaaggaaagtggtttctcaatatcttattgaaaaacctaatcttccagggttttcgctagatgaactaaccaaattattagtggatgctgtagctggtttagatattttggaagcttttgcagaaaatccaaatgtaactgatattgtttgtaatgactatgatgaaatatggattactgatcttaaggaaggaaagtacctttctgatattaagtttaaagatagaaaagcatatgaaacattatgttataagtttgcatatgcatctgggcaaacttggtcatattcaaaaccagagtgtgatgcttttttccctaacatgcgcattaacttaatgggatttgatatttcacaagagggtatttcacttgcgattcgtaagtttactaagggtttaagaattagtcgagagtcgattttagaaacacagcaagcaaatgaaattatgatagatttattgaaagctattgtgagaacacgcagtagaatattaatttcaggatcaacaggagcaggtaaaacggaattattaaagtatttagtgggttacatttttaaattggatagagttctgatggtccaggatagcccggaggtcttcttaaaatttatttatccagaccgtgacattaaaacttggataacaagagaaaaagaaggggttgaaaatgttattgacttagatcgactaaaccgatccgcactacgccaatttataaaatggctaattattggggagtctcgtggtggagaagcttggagtatggttaaatcagccaaaacaggacacccagttatgacatcattacattcttttggtgcaattgatagtattgaaagggttgtagacatgtgttcagagaaagttaatatgtcattagagtcattatatagaagtgtagcaaataactttgatttcggtattcatctagaacaaacactggatggaacaagaagaattacggaaatagttgaatacacaggttataaaaatggggaagtacagtacaataagttattttcttttgatatagaagcagaaacagagtatgaagatgaaaaaggtagaactagattcaaagtagatggatgtcataaacagactggctatttaagtgatttcagaattaaagagatgaaaaaggccagagtttttactaaacaattagaagatttacaaaaggatagggagaaagaagacctacctaagggaggggcagcagttgcagtatcttaaatatttaccatatttaattatgattgcagccatctattatgttatcaatgcgaatctagatagcatacaaaataaaaagaaaaatgcattgaaatatgttttaaataataaatcaaaggatagtaaatttattacatatcttaagaaaaaaggattatataagtggattagccctaatcagattattcatgagggtaaagaattcaattggaatttaacaattaaagattatagtatgcttttaattgtaggttcattaattggggtaataatattttatgggttttttatctcggtgaattttgctgtttttggtgtgatagtaggattagttttaccgagaattatgatgttttataaaaagaaacgatatgaactatatgttgaagaacagttgatgttgtacttaaattcacttgcaaatgcgatgtcagcatatgaaaaccctagctttgcgattaaaagtatattgcctttaatgcagtcacctattaaagaagatgttgaaaattgtttaatcgtacatttagaaggaactagtattaaagaatcttttgaaccgctgattaacaagtataaatacaagaatcttaagttatttcatgacatgttggatcttatctctaaaacaggaaaagatgaagatggcttgttaatgagaatagcggatgaatttcagcaaaaaaagatatataaagccaaattaaaagcaggaatggagccaaaacgatcttcatttaaaaaaattgctattatgacagcatcatttccattcatgtttttagcagttacagcagatgattacattgcttttgcagggacaccgacagggaaaataatacttacattaatgattcttgtaaacattatctgtgcagttaaagtcgagcaacattcattctatgatccaacagaaggtataaataaaataagttaaagaaggggataaagtgaatctattaaccacgattccactgtttctcttgctgttctcactaatatatttagtagtggattatgcatttgaaagaagaaataataaaaaatttcaaatacataaatatataggacggtataggaagaatgaggaaaatcgaacatttctattcatgctctttgaaccaattctaaagcttaaaaaaaattggatacctcaaagaatggaagaggaactaaatataaaattagataaagcaaatctaaagattacaccaattgaatttttgctaaaaaaattagtaatatcaatatttgttttcctatttgcgcttatatatgcatggatatttccacaatataagctaattatcttaacagtaggcttaataatttcagctctggttttcttttatgaaaacgtaaggttgaacagtatcattaagtctagggaattaaggttggagctagagttaccagagctcatgattcctctagggtttatgctttctaaattttcagcctttgaagcgacaaaaagatcaattgagtacgcatctgatagtataaaaccttatgcagaggaattggttgctaaattagaactggaacctggtagccatgagccttatatagaatttgcaaaagcactaaatattccatccgcttatcaatttatggtagctctagagcaatctatgaagatggatgaagaaaaaagtaaagaaatcataaatgcacaaattgaagtaatgcaaaaactacaatctgaatctcatgataagttagttaaaatgagaccaggattagtttctaaatatattatttttgcttatctaggcatggttattttaattatgggaatatcatttgtttctatatttgataaattcgtcaatctgttttaatagaaggaattaataaattaataaattgctatatgcaattattataaaaaaatacaaaccaaagggagaaatttattatgaaaacattagcaatcgaaacaaaaaaaggaacaggatttttaaacaagggaaaagatctattaagaaaaagtaaatcatggttattaaatgaatcttcagatgaaactacagataaagcagtatggatgtatattggtgtaggagttgctctagtagttttaacaatcctattagtagcaatgaaaacaggaacaggaaatatcgctgacttctttgtaagtgttacaaaaggatctaaagtagaaccttcaggatggggaaaataatagaataatattaatgtaagttatacaagaggggtagtttattataactaccctttctttttagaaaaaggaggccgagattaagtgagtgaggcaatacagtatgttttatttttcattgcgttaatggcaataattttctttggtgctgagtttgctggccatactgtatataatacaaaagcgaatgagctaagtgagtatgcagtaagtctggctgaacgtgaaggggaattttcaccaacagttatagagaaagtaaaaaagaaacttgatgattggaatatggattctgataaatggaaaatggattatacaaaaggtaaagtagactttaaccaacctttaaattttaaaattgaaggtgagtatgaatataaagtattcaatttgattcaaagtggagtcggtgtaaagaaagtatcaatttcaagtacccgtagtggtttaagtcaagtttatttcagaccctagtttttttaatagagattagtggtataaaaatacatagttgtccctttataagtgctttaaagaacatgtaagataccttatactgaaaggagaatgaaaaatagaaaatgaggaatatggtatggatattaaagattatagtataaaaaaatatagaattaggcccgaagcaatgaagctaattaaatatttaaattggaaagagacttctcaaaaagaagaggataagtttttcttagataaaattgtgaatacatatttctcacagattttggcgggacaaattttaattcaaaaagaaaagataagtggacgtaaagatagatcattattattcaaaaatgatactcatcaattaatagataaaaagcattccaaagcaaagtgtacaatgggtgaaacgatagaatttagcctatttatttatgctcaggaaaatttaacttcagaagaattaaagatgaatgatttaaatgcatggaatataacatatagaagggtaagaaaataatattatgttcaaaaaaatattaaataatgttggaatgatactattgggatcggcaattgctatatgtttaatataaagaataaaagcaggtattttatagtcaaactatagaatatctgcttttatttttgtgaaaatgcctattttcagaagacaaataaaaaatgggttttcagattcctttatatgcgtgtttcaaaggaatatccatggttttggtttagaaggacagaaaatgtatttaaacgaagaataagaacagtatagataattcgataatttcacgtaccctatttttctatttttttaacaataactatttttccagatgtatggttaatctttgggatgaggatacctttatctaaaaaatccttcttactttttaattgagcttgcactaaatcctctatgggattttttttaaatgtaaaacgctttttagatcgcttataatatttccaataaaacgtagtactttttaaccgtttattttttttagctaatgtttttaaagaaaatcctttaatttttccagaagagctattagcaacaataaatttattttttttattatcatagccatataggggaatccaatgtgaaatcatagatcctttttttaagaatctgtataatttaatcggattccaccaggaaataggggtagcaatgctgaataagacaaaacaattttgtttttgtatgtcctcaataacactgatatcatctaaataattaatatctttaattttaatatcataatcgatatttttatagatgaaagtatttttgattttattaagaaaggagatatacgattcaaaatcaaaaaattcacctacaaaagtagttcctgttttaatatttgattcatctttaacaatattagcctctaagaatgaatacaccattttatcagcttgttcctttgaaacatctttcttctgattaatatggtacattccatttataaaagcataaattccacaagtgggacctgtttgtttaatacattgagccattaagacccccctttttttcaaaacgttgatttaaaaacaaaaggcagccgtaattcacagctaccttttcaattatttgataaaacaccaggtaaattatgaagctaaacgtccctcaatttcatcatatttaacttttgcagtttgtagaactttgtctaatttagctaaaatttcattttcttcatcaagggagagtgctgattcttgacggctaaaaccatttaattctacttcaataagtagtaatttttctgtaatatcattatgtatagtggaagtatcattgcatatatccctaatctgtttcgctagctcactatacttactttgatagttagtaccacgagcttgcatatcacgaaatttttcactcccaatagtccttatttcagaaatactagtggtgaccacttgaagtattttttctagctcagatctttttttatgatcatttaacttatctagaagagcacttgctgtattagctgctgttgaggctcttttactgctaaatgtaccccatgcagcagaaccaatagcaatggcactactaactatactaactgcattattagtattacttacaatatcccatacagacattactaaatctctctcttaacatatttgtatttttccatacctctataaagctcgttaaacacttcttcccaacgcttgttttcccaaaaagcataagtaatagcttcagcaaaatgataaccgtgatcaggcacaatagcatttatttgcatttcaaactcatgatgagacacttgtttaccttcaccaatcatttttctgtattcgtccataagatccattatttgtgtgaattgtatttgagtgagatcgtaatcaaatactaatcgttctacacttccattggtaaataataaattttgcttaaatgttaaatgtgcaacttgttgttttagctgttcaatttcatctaatagtgctttgttttccatatatagttcctccaaattattttgtatttattatggttttttttacccaatcattatctttaatttcttcatcaattaaacttacaatttcttgtagggcatcatctaatgtttcaaaacaagagggattacaaacagctgtactaacttctttattagtttcaataattttagcttgtgcagcatactcattttcatcgaaacataatatttctattgtggccattgttcttccagcgactacaatattaaaatattttttttcaaataattgaattggtagtgtagatttaatatgtttcatagaatcatcctttctaaaatgtatttgcaacatataaatatattataaataataatataaaaatattccatttcatcgaattaattggcttttttggttaaagcattaattttttctgtaggcatatattatgaaggaatgataaaagggggcactaaatatggacatttactcattataccattacgtaagtaaaccaattataattgaacataatgtaggagcaagttatcctaatccgttaacagtgtatataacgaaagtaaataatgatcaaagtatagaggtaatttgtacaaattctttaggacttatggttagtgagaaatttactcaaactcaaattactaaatatacttgtttgtaattagaaaggagtttggatatgcaaaatttagagtacagtcaaaggcttgtaggtccagaatattttcaagggtacttaagtagacaaatcaatatattcacaataaatggtaattataatgtttatccattgcatgtagacagtcaaaatttatattgtacagaaaatggtacaatgctagcaatgatagtacctttaggacatataacgtctatacaatgtgtaatataaggatcttatatgcgagtatttacaatagttataaccctttggaattccagataaaaacgataaataacaatgtataatagaattataaaaacgataaataacaaattagttttagaaagaagttaaaggtataattagttaatgtagtttgtaaaagaattaatacatgactaaagtctttcaatttatatattaatttacattaatctaatatataaattgattaatttgttcaaagggagagaaacaaatgcaggtaatttttgaaatgattaaagatggtcaaaatctaaatagtgaattgaacaaacttgttgtcgaaccttatattgcagaaacaggtattaaacgagaagaaattaacctaagcgatttagcaaaatggatggaggataaagtgaaaaatgaaagatgataataaggaaataatatataacaaagaaaaaatcattacatctattgatgatatttctttattacaagataagctacaagaggaacaaaaagaatttaaagctatttgttctttaaccagggagtttagaaatcttattaaaaaggtgatgtagataatgagagaacgtgagaattcagataaacccatccgttgtttttgttgtgacaagtctattttaatagaatcagcaaaacttatggatggactttattgctgtaacgattgttttgaaaagcgtaaagacataatacttagacatagaacatctaaaatgaatttatttcttgtagaagagcaattaaaagagttagatgttaagtgtaaagtaaaactaatttcttcggatgaagatgttgaataaaggaatagaggaatatctacgttaatcaaatttgaattttgtagaaaggagaaatgaaatgaattcatttttattagtgccaattatttttatggcatttgtatttctattcataatgctatgcttgttagtaaatgtaatttttctttattttgaaaaggaattacctgatttattgaagttggcattaccaggaatgcttacgtgtctaattttgcttttatttcttcattttataaaataagttatttatacaaatgttgtttactaattttatgaaatttgaattttgtagaaaaggggaatgagagatgttgaaaaaaggcgataaagtagtgatgcatacatgcggagaagcgcaacactatgacggtaaaatttggacttgtacaactgatgaattcgtaagaggtgaaggtgtatacacgcaaaacttagtttttttagaagaatttagtgggtgtttcttagctaaatatctccaaagggtaaaatttgtacaaaaggggattatttaatgaaaaatagaaagttttttatgaaattgtcatgtgttatagcactttctatggtaggaggatgctctagttttaacatatctaataaagaatcaacagtacaaaattcatcacaattaccaaaagaaagcgattattcaaattcaagattcaaggcaatagagcttgatagttatacacttgtcttaattgataaacaaacaaaagttcaatatttaaaagtagctcgaaatgaaggatttgatggtggattagatattgtacctttgtatcaagcaaatggtaaaccatatgtaggtaacgaagtgaaagacaatcgtttttccacaaaagaaatagatgattatacttttattatcactgatgaagaaacaaaagttcaatatttaaaagtagctcgaaatgcaggatttgatggtggagttgtaatagaacctttattaaatccagaaggcggattactaacagctcaataaaatttgaattgtttataattttttctacaataggaggctataaaatggatgcgataccagaattaataacaaagaatgattggaatttactatgttgggatgatagatatagtagggggatatgggctatagttacacctcatccaaaccatatgtataaaataagagagattatagatggtgaagggatgctaagtacggaattagggttttatttccagaatgaaggttcttggctccctgttgctaatggaaataatctaatggatgttttaacgaagctcgatgacaaaattaaaccgatgattggcaacactatatggaaaaggagtgtatatgacacttttcaacactttcttgaagaaaactatagtaatttcggcttggaaattgctcttaaaaataaagtgaagattttattaaaaccagaggaattataaagggttatatcaaaaaatgattttcaaatcagaaaggaataataatatgagtgaattatataacaaacgtattaagcaagcttatgaaaatgcaaaaggatctatggagattgaaggctttagatttacagattctgatgaaaaactaattaccgcttatctaaaaaaagaaatcacaaaagaaacatttattaaaattgcgagggagcgtgctagaaaacatggtaaataaatctctttacacatacgatggcacagatgttttaaaaaataaatttggtattaaggatcaagcggaattagaagaattagaaaaattgataactacggccaaaatcgcagaattagaaattaagccaatccagggtaattttgatcttgatcatcttaaaaagatacataaacatattttcgaagacatttatgaatttgctggccaaatacgacaagaaaatatagcaaaagatttcttctcttttggtgatgctagattcattgaatcaggggcaaaagaactatttggtcaactaaaacaagaaaattacttgaaggttatgagtccggaaaagttttctgaaagagcagcccattatctagcagaaataaatgtactacatcctttccgagaaggaaatggtaggagccaacgtgaattcactagaacattggccaaaaatgctgattataaaattgaatggaatagggtttcaaaaagagaaatgatggatgcgatgattaaatctcatgtaaacacaaaagaactcgaaaatcttattaagtcagtgataacaccaatacaaaagaaccctgaaaaaacattgattagaaaccaaaataaaagtttggaaaggggataaatctatatgcaattagactattttagtctaaataaaatcttaatttggatcggcataggaatgttgatatgtttctttctaaaaaaaataagtaattatattagcaattggttctatctaaggagattatataaaggcagcgatatatcgaaaagtaagtgtgaaaaattttatgtgggtgaaatttcgaaagaagatttaggggaatgggagaaaacgcttaaagacttagatgtcttaattcctttatctaatcgtaatgaatctataccagctattataaattatgatttagggataatgtattctacatctaaagagatgttttcagagtatctcacattatatcatccagagcatgaaaaaataagatttcaatctgaacaactaacagagcttagagaaagaattcttcaaaaatatctacatgaattaatttatgaatccttaaattgtttggataatgaattagataatgttcacaatataaaagagaaaattgccagcataatagatactcaaaatagtagcaaggattatattgtatcaaagagttgcgaagagatttcgagtgaagaactaattaatgtactaagagaaatcagccagtatgtaccttgtattaaatttgaaacatggcacaaacgattaagtttttgtataaaaattgctgaagataatcaacgtttatcaagagagggaaaataaatatgtatatgacggtagaaattaacatgcatttaaatagaaaattatcacataaggacacgactgctatagcaaagaagcttggcgactttggaacgatggatgattatgtgaattttgaaggggattcacttatatttaaaatgactaaagagaaaaatagaaagtatataactaagctgctttcttttttagaacaatttttagaggatacggatgtaaacaaaataggaatgataagtatagaagcagaagagaataataatcttctcatttatgcctttaaaaagcatatttttattactattgaaggaatcaaagaggggaaaagaagctataaaatttttgatgtgaaaggcaatgaatataagtataatatggaaggaacagaacaagttcctattgaaaatcatgtggctgcaacatattttttacattattgtaaataaggtttttaaagtagagaggattaaaatgaaattcttcactttttcttactaaaaggaaaaacatgttccttagagaacatgtataataagaacagtaagagaagggagaagaacacatgagcgaacagggatattggagtaaagagatctctgagctattacaaattggggatagtacactgagaaagtggtgtattgctctagaaaatcaaaaatatatatttattcgtggccgaaataatagtagggcttttgttgataaagatattattgttttgaaacgaatgaaagaacttgtacaagaaaaaagtataaatttagaagtagcagcacaaatattagtagcaggtatgaatcctgaagaaagaacaatgggcgttcctgaagaggaacgccctggaaactatctacagaccataaatatagaagttcaaaagctagaacagatattagaacaacaaaaacagcaagaagattttaataaagcacttttaaaaaaacttgaagaacagcataaatactttgaagaacggatgaacgaacgggaaaaaagggcagaagaacgagataatttactcttacaaaatataagagaaatgcaagaaacaaaaaaattaatagcagctagtgagcaaaaaaggaaaggcttttttagcaggttgtttagaaatacttaacaaacggtaagataagtgttggagaattaaacgaattcattatttaactacatataaaagagtattcatgtagttattagcagattataaatagagaataaatgaaggtgatacctttagggaaaggtaatgttaggtgattgttttatggaaaattatataatttggttgaaagaacaaggaaaaagagagaatacaattaagcaatatgaaactacattaaaagagtttattcagtggtatgaagatacaaatggggttgtattccagggagagtcgattacacctatggatcttcaagagtggaaacaatttctaatggaagttgcaaaaacaaatagtggaaaacaattatcagtttctacagtttctacaaaaattggtcgagtaaaaccatattttaaatttttatatgaaacgaatagaacgcagacaaatctaggtgcaatggtaaaacaacctaaaattcaaaataaaaatgatgctaaatggcttgatcgtatttctaaaaataggcttatgaggtacctagaggatgttgaattaattaagaaaaatccttggaaaaactataggaatttggcaatagttaatataatgttacaggctggattaagagtcagtgaggtatccaaattaaaactagacgatattgaagatggttttatttctgtacgggatggaaaaggtggaaaagccagaaagattcctatgaattcagatgtagtcaatagcattaataaatggaaagaacatagacaaatacatcaagcttttaaagaaaatcaaacagaatatctttttgtctctcaaaaaaatggtccactatcagttgtaggaatagaaaatatctttaagacaattcgtaagcatacgggattggaggaactaacaccgcatgtacttagacatacttttggccatgatttagtacaaaaaggtattccaatttcatatgtagctgaattgatgggacatacggatataaatacaaccaaaatttatgttacagctggccagcaagaaaaacaagaagctgtagaaaagttagcctctggaaagtatacaaaatagtttctctacttaaaaggttgtagtacttggaaatatttcagtactacaaccttttaagtaaaataaattaaaagcaagaaacctttaaattatcacgggggaagaaatgaaggtggaaaaatgaccggtaattttcttgtagacagttttatacttattgcatcggtaggatatttgagttgtattttatacaagctaattataaatataagtgaagatgaacatgaataatttattaacacctaattttatagataaaaatacctaattaattaatttttatatggtataatatacctaacgtagttctttaaagaactctattttgcaaatagcttagaatatctaaatctaaatttatttttttgaaaaggagtaatttaattgagagatattttacaagtgagagaaatttataatgtatgacggtgctttttttagaggatgtttcaatggtttaaaactagttgctccattttggttgattattggtttattagtttatatgaacatccagtaatggattataagtaatttttaggaggtaaattgatgggaaaaacattatttattgcagaaaaatataaagtagcacagaaactattaaaatctccacgtttcaaaaatttaaaaaaggtaaatggcacaatgccttactatggttattttgaaaatgaggactatattgtaagttggtgccagggccatttattaagattaaaatatccagaagaaattgatagtaagtataaagaatttgattttgaacatttgccaattcttctagaaccacatcttaaagttatagaagaaactgaagaacaactgaatatcttagtagaactattaaatagagaagatgttgatttagtggttaactcatgtgataaggacaaggaaggagaattaatctatcgtgaagtttatagctatgcaggcgtagataaaaatgaaaaaaggatattcacagcatcatatgagccagcagaactagaggcagcgctaaataacttgttaccaggagaagagtttgatgcgttagcatcggcagcaaatgcaaggcagtatttagattatgcccttggaatcaatataaccaggggatgtacaactaaactagctaataatcaatttttattaagttctggacgagtacaaatgtgcttacttaatgaaatacgccaacgtgaaatagctagacaaaattataaggaacaaacttcttataatttaaaagtcttaacagctccaggatgcacagctgtaatgaaaactgaagaacaaattttagactcagctccattaatacaattagcaactagaattaaagatacacagttagtcgtaaaagaatttagtgaaaaggaaagaaaaaaacaatctaaatcactatataatttaacggatatttacaaggatgctttagcaaaactaaagatcagtcctgaagtcgctaataaacatattcaacatctatatgaggaaggatttatttcttatcctagatcatcatcaagacatttaccaagggaacaagttaataaagtaaaagaaataatcactgttctagaagaatctaactataaagaatttgcaaacatgattgatatttcaacggtttctgagaaacattcatcatttaatgatgaattagttaatagtcattatgctgttattcctacgactaaaaaatatgatggtgcaaataaaaatgaactagagcaaaaactatacgaacttattgtaaaacgatttattagcaattttatgccgcctgctatatatcttgtgcgtgaagcatcctttgttgatcaagaaggtaatgaatatgtatcaaaggaaagacttttacaggaaaaagggtttttaagtgtattccaagaggatgaagaagacgacgacgtaaaagaatttaaaatcccaatgctaagtgaaaatgatcgtttattaattgttaatcatgaattaataacatctaaatctaaaaaaccagcattacatacggaaagtacaatgttaacttttatggagtcagccggaaagaaattagaggatcaaaacttgaaagaattaatgaaaggaaaacgtattgggactgtagcaacagaagctaaattcatcccaaccttagaaaatagaggatatattgctattgaaaatggaaaaattagtacgactgagattggaagagcatttgtagacactttcccagtagaacaggtaaaaaaccctgagtatacagcggaattagaaggtatgattacatccattgaaaataaagaaatggactataacgaatttgtcttgcaaacaaattcgtttgtagaaaaggtagttgaacagttagggaatatagatagtaatgtggcaattagaatggtaaatacccataataaacaaatagaaatatgcacttgtacatgtaaaaagggaaaaatcattaacaaaggaaaattctatggatgtagtacttatccaaattgtgaaatgtctattcctaaaaagataaagggaaagaatattccagaagaacaaataaaaaaactttttaaagataaaaaaacagatttaattaaagggtttgaatcagagaaggggaaatttgatgcatatctagcctttcatgaaggaagggtgcgattagcactccctacaatagatgaattatcattaggcagatgtccaaaatgtcagaagggtaaaattctttcaaaagaaaaattttatggatgcagtgattataaaaatggttgtgattattcctttcctattaaattaaagggaaaactcattcctaaagcacaaataaaaaaattgtttagtgggcaaaaaacagattttatcaatggatttcaatctgaaaagggagaatatacggctgcactacaattaaaggatggtaagccaacatttatatttcctacaatagatgatcgtacattaggtaaatgtccactttgtagaagcagggtacttgtaggaacaacaaattataaatgtgaacactataataaaacatgtgattttaagattaacggaacatatctaggtaaaaatattacaaataaccatataaaaaaattattagaaaagaacttaacagatatgataaaaggtctcaaatctaataaaacaggtaaagaatttgatgcccgattatcatatagcgtagcacaaaagcggttaacatgtatttttgagaaataggataccagtttatattttcatattgctagataaagggagtttgaaaaatgttgagatctagttattgtacttcgataggataccatattggtaacctagaagttgaaatagtcatagatacaaattatcaaacaaaagaagaagctgaaaaattggaaaataacacttctcttcaccaggcaaagttagataaagaaaaactagtaataaatgattcaattattataaacaaagatgatattgatagataccagtttagattatgcaaagtatggaatcccattatttcagctacagattttgaagcagtttcatgggatgaagcaatacaatatttatctaaagaatctggattcaatatgttcaatttggaatcttattactttgaagtccataaggggaagcatatagtaactaagtaatagggggcaaaggaatgaataataatactttcatagtcagtcctagtaaatttggtgtaagaagagaatattttatcccaagtttactattggaacaaaaaaagagcttaattgtatttgataataacgtaaataactcatatgagtatacaaataaacaaaaacaggaacaaggatatctagtctttaaatacgatgtatttgatgaagaactatatataaaattgcagcaactactaacagataaaaataatcaaaaatatatattctatattcagcagggagcttttacattaaaccaggaatttagaactaaaaatggaaacgaaaaaatgggagagttatttcgaatgattctagaaggggtaccgccacatgcccatcaacttaagaatttgcactacccccaagtgtcaaaaaacgttattccttcttgatgttgcctaacttttttcaaaatgtcctttacaaagggtacagattacactactcttccttttctttatgaactttcaatttttaagtataaattcccgtctttcccaaaaactaacacaagtaaatgatgtaagttaggggtgagaaaatgttcggtttatcatctaagaaatcaaaaaagactaatacaaaaacactttgttctatcccagaatttatacaaaccatgaaagaatcaagcgattttgtctcttataacatacttaaagatgaaacgttgtgcttgttttattataaatctgtcgtggaagcacttattattaaacaattcattttaactcctataaaaaaggaatcggaacaaatccaaaacatctctgatttatgtaatattatctctattgaagacattattacctccccttctattgatgatattcgtgaaaaattattaggtggatatattttaatacgcttaaaaaacgattcgaatcctgatcaatatgctttaattcgtgccgaaagtactgttttaggaaaacgattatataacgatacagaaaatgagtatagcgtaatcgggcctaaaatcggtttcgttgaaaaccttgatacaaatatccacttattacgccgaaatatcgtaacggagcaactcatttttaaagaagttaccgtcggatctatatcaaaaacaaaagtagcagttgcttatatagaaggaattacaaatgaacaatttgtcaacaccgcaattcaacggctagaagacattgactttgatgtcccatttgattcaactatgattgagcaatttattagtgataatagcaattcaccttttcctgttctattacctacagaacgattagatcgagctgtatttgcattaattaacggggaagttttaattttaacagatggctctccatatgctttatcaggaccaacaacgttactggattttttcatttcaccagaagattattatttaccgtggatgattggatcgttctttcgtattattcgttttttcggagctatattttctcttttttcctccgctatttatacagcggctttaacatatcattatcaaatgatccctgccgatctactaggtcctattattttctcgagagctaacgtaccttttcctcctattctagaagcactctttttagaaattacaatcgaattgcttcgtgaagcaggggcgcgtttaccaacaaaagtcggacaaacgatcgggattgttggggggattgtaattggccaagcatctgttgaagcagctttaacaagtacaattttattaattgcagttgctttatccgcccttgcatctttcacaacaccgactgtaaagatgtcttctactatccggttgttacgctttccgcttattctcttagccggtgcattcggaggattaggcctcgctgtcggatttgtatttattttagctcatttaattaaattaaaatcgcttggatcaccttatttgttacctttatatccatttcgtggtttaggtacagcagaaggttttcttcgattaccatttagtcaaacggcacaaagaccttcttttcttagaccaaaatcaaaatggcgctacaatccaaacaaatcgaagcaaaaacgtgatggtgagaatgaatgaaaaaaattttattgcaccttatcattatcttcttcgttttacaaactggctgtacacaaacgtatatagtggatgcacagcgtattattcatattgctggatttgacatcacaaaaaacaaaaaattccaaggaactattctattcccagagtacacacatggtgtaaagtctaaaccagagacgcaaacaacatctgcccgttcacttgaaacaattgcttcacgattaaatgcgaaatctcctcacaatgttgttgtaggtcaaatgcgtgtcgtcctatttggaaaggctctaggggaacgcggaatgggagagattattactaacttacaacgtgacccaaatatcgggcgtgatgtacaactagcaattgtagatggatcggctgaagagcttttaaattacgggaaaaaaaatgggtctttatatattgctgatttactcgagcaaaatataagaaatgagaacattccacaaactgaattaaacatttttttatataattattactcttctgtatgtgatgcctatgttccttatattaaaatggacgataatcattctgtcgctgtcaaaggacttgcctttttaaaaggcgataaagtcgtcatgtatacggataaaagacattctgttttagcaaaattacttattaatcctacgaaaaatggacgttacgaagcagcaataaaaaaggataaacataaaggtatggttgtgatacaaaacttagctgggaaaaacaaatatgatatagatcaaactggcgacataccaaaagtaaaaatccatttaaaattaaatggattaattaaaaactctcctaattggattgatttaagaaaagaaacaaatatcaactatataaaaaaacaaattgaacgaaatgtcgaaaaagactgtgaagatttaataaaacaatttcaagaaaaggaaattgatccgttaggaatacgagatgaaattagaagccatacgagaaaatggaatataaaacaaattcgaaatatgtataaaaatgtagcggtagatataaatttagatcttaatattgtacaatctggaatcggagaatagtgaggtgaaataagcaatgaatacaatgaataaaacaaagacagtatctccatattttgcatttattttattgcattctctccagattggtataggaattctcggatatcaacgtgtaattttgaaaaatgcaggttatgatgcttggatttctcttattattgcaggtattgcaactcatattgtactgttttgtatgttaaaaatgcttgaaaaagacggagatttaattagtattcatacaacaacctttggaaaatgggttggctctatattttctgtaattttcactctttattgcttattattttgccttactgttcttcgtacatatatggaagtgatacaagtttggattttccctaccattaagttatggaaacttacgcttatgtttttattagtcacttactacattataaaaggtggcttccgttctgtgacagggatatgtttttggggtattgttcttcctatgttcgttgtattctttttagtctatccgatgaagtatgcacattttcgtaatattttacctatttttacacattcaccttttgacatgcttatatctgcaaaacactctgcattggaatttctagggtttgaaacaattcttatcttttatccctttattgaaaaaggaaaatctttaaaaagatgggcccatgctggaattgcttttagcaccttaatttatgtagttttagctatcgtatcttttatgtattacagcgagggacaattaaaccgtactatttggcctactttaacgatgttaaaaataattaaagttccttttattcagcgctttgaatatattattattttcgtttggtttttaattattttaccaaacctttgcttaaccatttggtcatcatgtcaaacgatgaagcgttcctttcatatttcatttaaatttacattaccgttttttattttcatcatattttcagcttctctacttttcacaaaccgtgaaagtatcaacacattaaataccgtactatctcaagcgggtttatatattgtatacgcttatatcccaattttatttctattccattcgctaagatggcgcttcaaaaatcagtcaaaaaaatcttcaaccgatacaccgtaatctctgatacaatttgattaatacatttgtaaaggggacaagcgaatgaaaaagtatgtattttctttacttgcagtactaagcttaattcttgctggatgcggaagtactggtacaaatgaccaaaaatcttctgaatcaaaacaagaagaacatgaccacgcatcgcacactcagcaagctgacattcaagagaaaacaaaaggagtcgacacacttccaaccttcctagataagcttgatccacaaatgaaagatatctacaccgtcgctggacaaaatgcagagctattagattggattccatgctattgtggttgtggtgaaagtgtaggacataaaaataataaaaactgctttattcgtgaaattaaaaagaatggtgaagttgtttgggactcccatgcaacgacttgcgtcaattgcctagaaattgcagttgaatctgcttccatgaaacaaaaaggaaaatcaacgcttgaaattcgtaactatatcgataataaatacaaagaaggctatggcaaaccaacacctacgccaatgccaaaagcttaaaaaacgagggaattcctcgttttttcttttcattctcattttttcttaacaaattctttcaagtgtatttctccttacttatcacacactatatataactctcggtaaggagggtacacagtgcaaacatataacgactatgataaagctctctattacacgtattgctgtaattgggataaattactcgttctcatggttcaaacgaacgatcaattattttctaagcgtattgagcattttttacacgcttatcaatacagcaaggaactgccagaagttgataaacaattgcagctcctatttcaatatattgaccacgcatcccaaaagtcgcatgtagaagaagtagaacaaattcaaatgtaaactatagcgctattctcttccggagaatggcgctttttttaaatttttatatcaataaaagtttctcctcataaaacttttattgataaacatattttttctttcttttccataccacttcatactataatttagtatgtaactattataagagaggtataaaatatgggacgagaaaaaaagcaagaatatgctttacttaccgcatggggagcttcttttatcgctacactgggaagtctttatttttccgaaatcatgaaatttgagccttgtgtactttgttggtatcaacgtatttttatgtatccattcgttttatggctcggtatcgctgtagcaaaaaaagattatcgcatcgcaagttattctttaccaattgcaagtattggtgcttgtatttctttatatcactatgcaattcaaaaagtcccagcgttttcagctgctggagcagcttgcggtcgtgtaccctgcaccggagaatttataaactggtttggttttattacaatcccgtttttagcacttatcggctttattacaatcgctgtttgtagctttattgtcatcaaaaacaaataaggagatgaaagaatgaaaaaaatgcttatatttggtggtattattatcgccttgttcgtagcaattttcgctgtcacacaaatggaagaaaaaaatgctactagccaaaagattgataatcctactgaaagtaagacaaacggtcctgactactacacaaataaaatctctctttcagatcttcaaaagaacttaaaagagaaaaaagaagaaacagtatacttttatcaaacatcttgcgttcattgccaaaaattatctcctgtcctcgtgccaatggctaaagacttaaacgttgatatgaaagttatggatattgaaaaattagatgctccttgggatgaatataaaattcaaggaacaccaacaatcattcattttaaagatggcaaagaagtgagccgtattagcggtgaacagccgaaagataaattaaaagaatggcttgagcaaacgaaaaagtaactagaaaaggaaactccttctacacatgaaatgggtgtaaaatcccacactaatgtataaggagggggttttatgccagaagtaagatgttctgtttccaactgttctttttggggacaaggtaacttttgtcaagcaagtgcgatcatcgttcagcctgatgcagatgaaactggtcaaactgaaaatgattcatatacagctgctgttttaacaaacgagacgctagaaagttctgtagcaacgagtgtagaaacttgttgtcatacatttaagcctaaatattaaacaaaaaaagcatgcgattaatcgtatgctttttacattcccctccaaaaatcatgcataataaaaaagtacaaaataacgagaacggccgtcccgcataaggtaatgcgccgatatatactcttctctccttccctcgctttcacaaacgcccaaataaatccgaagaacaatattaaatcaacatatggaacataaaaagaaaagacgagaaacgcatataaatacacgataaataaacaggtcgttactaaaaaaactttaaacgcaaattcacttttcataatataaccgccccctatctgtactgtattatattcagcaaaatataatagttgcagttaaactccaagtataaataagctaccgtctataaaacggtagccattacggaacattgtatttccgtttatatatattacttaaaatcgaagaaggaatttgctcgtaacgaattttctctcctgtttcatctataatatacgaattgtttcctatataatatattccatcttttcgttttgagtacactggatatctttcatttggcaataccgttttcactttcgttaactgtccatttggttcttgccaatatatatccgcgcggtctactaacgtaagtactccaatttgttcttcttctattttccgactattccagctcacaacgcgataaccaagcttattcgcttcatattcggggctcgtatgaaaacgagaaatgattacttttgtttgtaattgtactctgtcatacaaccattgtatatccctgtcatgcatgcgaatacaaccatttgattccctacttccaatcgtccattcccgatttgtcccgtgaatcgcatattcattcttatctagtccaagccacctcgtaccgagaggattattcggtgcacccccaggtattttttttcgatggtattctttatttttaaatttagttataatacaaaagttaccttcaggcgtaggtgtacgatctcttccagtcgttactggaaatgtttttgtataatttccattctcaaaaaaagacaactgatttgtcgtaagattcactaatattaaatgatctgtattagcaaaagcactaaccggtaggatgaaaaataatagtatgacgaaacataactttttcagctatatcccccctagcgctcactataataagtggaattaacattactttgctcttataaatgaaaactatccatttacaataacgcccccatttacatgtatcatttgtccagtaacataagaagaatcaccagacgctaaatatacgtatgccggcgctaactcatatggttgaccaggcctttgcattgggacattgctcccaaactgagagactttcttctcatcaaagctcgatggaataagcggtgtccaaatcggtcctggtgcaacaccatttacccgaatccctttttgcactaacgattgagaaagtgatcttgtaaaagctacgattgctcctttcgtcgcggaataatcaattaacgtttcatttccttcatatgcaacgatagatgccgtatttataatgacatcccctttcttcaaatgagaaagggctgctttcgcaacgtgaaaataagaaaaaatattaatacgaaaagtcttttctagctgttctgctgtaatatactctagtccttgctgcggatattgctgcgcgacattatttaccaaaacctgtaaactacctagctgctggacggtctcttgaacaacatctttacaatgctgttcatcacttaaatcacccggcaacaatacacactttacaccttctttctcaacatattgcttcgtctcattagcatcttcttcctcatctaaataagcaatcgcaacatttgctccttcttttgcaaaagcgatggaaactgctcgtccaattccgctatctccccctgtaattaatacattctttccttttaacttttcgctacctttataattgggatcttcaaactgtggtagaggattcattaatgattcaataccaggctgcttattttgatgttgcgcaggcattgttataaagtttttttgctgtggcatagctgctttcaactccttttccttagcatgtgcacaataaaaagctgaaattcacacatcggtttacgattaatattcgaatttaagacacaaaatatgaattgttataaactttttatgcaaaactattgcaaaatagataaaaaacgaatattatatataactgttgtgaaaattattcgtaaacagaaaggatgtttatatgtttaacctttcaaaacataaaacttctattaaaactgaaattatggcaggtattattaccttcttaacaatggcatatatcattgtcgtaaaccctgttatccttggagatgcaggtgttccatttgaacaagcatttacagcaacaattattgctgctgttgtcggaacattatttatggcaatctttacaaacttaccaatcgcaatcgcgccaggtatgggattaaatgcttacttctcttactctgttgtaaaagcgcatgaaggcatgactttcgcaattgcattctctgctgtattcgtagcaggtatgattttaattttgctatcatttacatctttccgtacaaaattaatggaagcaattcctgaaaacttaaaacatgcaattactgctggtatcgggttatttatcgcctttatcggtttacgattaactggtatcgttacaaaaaatgatgcaaacttagttggacttggtgatcttcactctgctccagttctactagcattagctggacttggaattactattatccttatgtctttaaatgtaaatggcgcactatttatcggtatgctattaactggtattatcgctttcttcacaggacaattaacattctcaaacggtgttacatcaatgcctggattaccagaaggaattatcgtttcaaatccaattactgctgtatctgacgtaattaactacggattatacggcgttgtattttcattcttccttgttacattatttgatacaacaggtacattacttggggtagctcaacaaggtggatttatgaaagacggaaaactcccaaaagctggacgagctcttctatctgactcattctcagcaactattggttctatgttcggaacgacaccatcaacagcttacattgaatcatctgctggtgttgcagctggtggtcgtactggtttaacaactgttacagtagctgttctattcgcactagcagcattcttcggaccattagtaagtgctgtctctggtgtatcagctattactgctccatcattaattatcgttggtagtcttatgatgggttcagttcgccacatcgattgggacacatttgatgaagcattcccagcatttttagtaatcttaagcatgcctcttacatcaagtatcgcaacaggtatcgcacttggatttatttcatatccacttatgaaagtggcaaaaggtaaattccgtgctgttcacccacttgtatatgtatttggaattttgtttgcttatcaattgatattcttaccacattaaaaaagtagagcatcgaaatccgatgctctacttttcttttacaacaatcattcaaactataaaggcacctccaaaatatgaagaaggttataaccttttaatacttctcttctacctttaattctttactatacttttgaatgaaaactgatgaaataaccattactatgcccacactaaaaccaataagttgatctattaacatttcatcatgaataaaccagcgaagtaaaaatacgctaccaaaaataaacatcataataaacccagtatgcctaagtcctttatagacattttccatatgtatcacctcttcacatagcattatccatattataccatacaaccatcaagtaaccgtatcgtcctctgacaatatgcagctaccttttgatcatgtgtaacaactaacactgtttttccttctttattaatctcttgtaaaatactcataattttctccccattttcttgatcaagagcaccagtcggttcatcagcaagtataatttttgtatcttgtgctaaagcccttgctattgctgttctttgctgttctcctcctgataactcgtaaggatatttgttaatatgcctctcaagccctaccattttcagcatttcttttgatatttgcatacgtttcttatgagaaattcttctatatataagcggaagcattacattttcaacaactgtataatcatctaatagcgaaaagttctgaaacacaaatccaacttccgtgtttctatacttatgataatttgacttgaatgtactcgtatccattccatctaaaaaatactttccagtagaggggctatcaattaagccaataatgttaagcaaggttgatttcccagaaccagatggtcccataatggctatcatttcgcctttttctattgtaagattaatatcttgtaaagcactaaaattactctttccgtatcccttagccacatttgcgagctgaatcatctataacacctctttcatatatgtattttttatttttagtacattgaaataaatgattgcatatataacgaggatcattacaattgataaagcacctataacaaccaatgattctatagagacttttaacgttccaaagaaagatactatactattttctagccctttctgaatttcaattactccgctattctcccattgaaaatacattatgcctatacatatcgctaaaacgaatagcaacatatactcaataataaatggaagacatatttgaaaagtgcttgcacctaacgctgatctaatagaaatatttttacgctccatataaagtgctgccattgatgttaatacaatagatagaaatgaaaaaaataagactgtaccgcttaataataaggggtatgacatattatcaataccttgtttttcgttttctaacaatttattcggatttgtaacataatacgaataacccttaccttctgttacctttaatactttcttttgaagttcatttatatttatcttatcatttgtttctataattaacccattgtataaaagttctacactatagaactctatttcttctgttccaattggtaaaatcgccatgtcatctaataatgtaatacgattatccgatatttcaccacttcgaggatatgtaaatggtgaatttttttctaaaaaaccaattacttttagcttcatttttaaagatggtataacatcaccaatagataccttttctatataattagcccctaatataacaggtctaatatcaaatactgatttatgaaattccgattcctcaaaatatcttccttgtgaaattcgtatacgaaagtacttattaatatctttatcaacaataagagtctttatcgttccattttctttttttaaactaagtgaatagttacggaacagataattagttttatttgttattggtatcatattagataacccttgcatgaaatgttgataatcatttttcgctttttcttcgctaaacaaggttatatcttgcgtcgcataaagttcatagaaatttttatgagtcgataaattatttgctaccgtcatcatttttcgatatcccgaaagattactaacaaattctattgctgaagaaaatgcaataattaaagaaattactataatcaaacttggtaacaaccgttttttcacagaccgtatagaatcaaatataaaaaacatgacgacctcctacgttcttaaatgttttccgggatatatatttataatgtgcttgattggaattacagtaacaaaaattgtaagaaaaattataaaaataacattgcatatcaatacatatagtgttaacggttttactaagtatgtctgaaaataagtatgaattgttcccgaaaatatttctaacgtaataaaaactaagaacatcgctgctagagaaataaacaaaatttgaatatatagttcgcagtagatagatatattagaagcacctactgctttttttaatgaaatctctctttcttttttataaatccaaaataaaaccgcagaaatgccagaaacaattgcaacaagaataaatttataataatacttatttgctggatctatatgtgtcacatgtagttcttgaagatctcgttcattcagcatttgaacatctcccgaaagcacttctttactcctacccataaacttttttatttcgttatgaatagatgatgtaggattaacaactgttaattgtaattgtttactctcgataataccttttttagatatagtaggtaagttttgaagtggaacgtatatgcctgctacacctacgtcactgtcttttcttgatatagttcctatttttttatatgtatcatcaaattcatataactcctctacattcgtttgatcgccaacaaccatatcgtttacattttcacgatgaaaatattgtccttcagaaatatatggcttccaataataatcatcttttaaattcacagctatgatctttgttgcccctgaactatttaatacttttaaatgctctacataaatatcacttttaacaaaagtatcttgtatgaaaggaattatctcttccaattcagttgcattcgctatcggaacagttaaaacttggttcttctctggaaaaccaatttgaaaagcagatataaagtttcgtttagactctgttaaaagtgcggctattgatatagaaagaaaagaaataaaaaatgacataaggagaattaagaaaaacagtttattgctttttatatttttaaaagctaggtacatgtctgtgctccttttaaataagaaggagatgatgaacatccccttctccttatctaaatatttataaagacagcggtttaatgctttttaccactgtaatcataagttaccattactatcaaaagtacctttgtgtgtatcttcttgatagtcattattctcatttgcataatgctccgagtatagtccttttgcaccaaaggcgttatatgcaccattactcacagttgcgtttaatgctcttccagattcatgggatcctaatttgtctgaagcgctttcaatatatgaattatttccatttgatttaataaaagaaattgctactgaacaacgagatgcattttgattcgtagtagtttgagctctgtaagatagtaggttaccgcttttgtgaccgcttagagttggatagaatgcacttgttgaggttgatgttgctaataatactaaagtcgtaattgaaaaaacttttcctttcattaacaatcacctcataaatttaatagtttagtagcgctacatcatcataatatcctttaaataaattctcctcaacaaaaaatcccaatgttttacaaactctttaaacacttaaacattcatacatttttaaaaagtaacgtataagtagcaatataaaaaagctgcggagaaactcttctccgcagcctaatacttatttttgcaagaacgcctttaaatctgcaaactgtctctttgcatcttcatagccttgctcgtataaattttgtagttttgctttatctttttccatacgatctacttgaagcggcacttctgggcgaataacaaataaattaccagcttgctcttctttttcaatatagtgaagtgtttcattatacacttcataacgattgagcatcgtgttaacaagattcggatattttttataagctttcgcagcaacccatccaaaccttgattttttcttcgcgtagccatgatttctcgttaaaataacgactgattttttaaatccatcctcttgcgctttacgaactggaattggatcagaaatcccgccatctaacagttgtttaccgcggtaatttactaccggtgcaatgaaaggcaatgaactagacgcttgtaataaatttagcgcatcatcattcgttccttctttttcaaaataaacagattgccctgtttcacaatccgtcgttcctacaaggaaacgttccgggctattaaagtatgtttcaaaatcaaacggcacatacttttctggaatttcatgaaaaatgaaatccatatcaaatagctgacgttttctccataagtttttatacgataaatatttcggatgtgatgcataatcaatattgaccgttttatttctatttctttgtctggaaagatacgacgctgcatgacaagcaccagctgatacaccgattacatatggaaaatataaatcttgttccataaagtattctaatatcccgcccgtgtacacaccacgcataccgccgccttctaatactaaccccgtattttcaagcatgttactctctcctctatatatattgactctttaattattcaccatgttaagtatctttttctattatatatgagttctttcagaaattatatttaaaagacttgagaaaaaggagttttttcttccaattatatttccaaatgatcggagacatcctttataaacctttgaataaagtcttgctcttctttcgtatatccatctaaaagtaacaaccacttttcttcagcttgcttatgcaatttttcatgagctttatatattttattcccactttccgttaagcggaagaagatttctttttgattatctaacatttgcatcttctcaacgaattgcttttgaaacaactttgtacaaattttagagattgctcccttcgtcatgcccatttctgtcgtaattgccgttacatttatcaaaccattttttccgatacattcgattacatgtaactcagataaagacatactacttacacctgtctcacgaagaaacttctcattttgtcgttttaaatgttcttcttttttatgcaaaagtgtacgaatgtccgaaagtatttccatttgcttcgttgcatgcttcaatccgttcgcctcctaagtttccaaagaaacaatttaactatataccattttaaaaccattttttcatctttacaagtgagaaaatcatgttaaaataaatttagtttcctaggaaactaaataataaggaggttaacatgatgaaaaaatctaaactaacttttattttatatgttgtctgtattagtgccttattcggttccttcgctcaaaatatttacacacctatcttaccgatgattcaaaattcttttcatacttctctttatcttgtaaatgtaacagtttcactttttacattcgttcttgcgattatgcagctcatatatggccctttaattgatacaaaagggagaaaatctgtccttattcctagtttaattattagtacgattgcttcaatcggatgtgctttttcggcaaacatttatttatttctcttttttagagctgttcaagctataggaatagcggctatacctgtagtttcagcaacgattatcggcgatttatttgaaggaaaagaacgcggagaagcgatgagcctataccaaatgttacttgccctcgcacctgcaatggctcctctcataggtggttatcttggcggtataaatggtcacttatctgtatttctctttttatctacacttggcattatcttattaatgataaacatttcactacttccagaaacaaagccaaatgtaattaagcagtctaaagcacaaaagaattactctcttatcttaaaaaataaaactggattttctattactcttattggcttcattcaattttgtatttacttttgctttctcgtttttttaccgagtattttaacaaattcatttcatttaactgtaaataaaattggtcttatgtttgtaccaatgtctctttctatcatgctaggaagtttttgctacaagtttttgcaaaaacgcctcacaacaaagcaagctttatttattacgagtttcttcaatattatatgtgtcgttttattctctttcacatatagcatcaatatcccattcatcattatcgttacatctttgtacggttttagtatgggactttctatgccaactcacactactttattaacagaagaattcgtacaagaacgtgcaacagctatcggtatatacaacttcatccgctatcttggtatgggtacagggccacttataggtggatttcttttatttaaccaaaattacttttggattttcttcctaggcgcaattatgtttttacttgtaatcttatatgcaatgaaaatgctaagttttcatgctgtacaaaaattaaaatagagcccccaaaatgtcggctctattttaccctctttgatccgcaacaatatgaatatcaatatactttgtttgtctcataatttcatttacaatagagccttttcgtatttcttcccaccttgttcttgcagattgtccaagtaaaatttgcgtcacttgtaatcttcttgcgacttcaataataacatccgctggttttctccctttcgcctcttctaatacaaaactcgcatcaaattgattggttaacgatttccactcttcaatcgtctgcttttttccagctgaaatagaatctatattttccctctcaacgtttaatacgtacaattcagcatttaaccgatcagccatgcgccatccccgtcttattaatttctccgctgttgaactgtattgtacacaaacgagaattttttcttttacgccaattggttctattactgtttggctaattttctcgtccatatcatcggcaacttctcgaagtgataattccctaagtgctcctaaattattaagtgtaaagaagttttgtaagctttgctgaattttttcttctttatatatctttccgtctattagtctcttccttaatacctcaggcgttgcatcaacgagctgaatttcatttgctttttgtaaaataaaatctggaattcgttctcttacttttacattcgtaatttgagctacaatatcatgaacactttctaaatgttgaatattaaaagctgataataccgatataccagcctctaacaattcctgcacatccatataacgtttcttatgtttagaaccaggaacattactatgcgcaagttcatccactacgactacttgcggcgcgcgtttttttattccttccacatcaagctcataaaatacctttcctttatactgtatttctttcaaaggaactttttctaaattagcaattgcttcttccgtctcttttcttccatgcgtttcaattaaaccaattacaatatcaattccatcttttttcatttcccttgcatcaaagagcattttataactttttcctacgcctggagctgctcctacatatagctttaactttccgcgattttgctgacgaatatattctaaatattcctctggcgttcgcctttgaaacttcggttcataatcatctgcatacaaaataaacactacctttcattcgaaacaacgctacctcaatcctttagattgaggtagcactgttgctattttattaatttctgtaactctaaatttaattttaagacgttcacacgatcttctccaaacaagccgagtgcagcgccttccgtttgatccttaatcaattgattaagtttttctttcggaatattcgttaatttcgagatgcgatccacctgcaccgaggccgcctttggactaatatcaggatcaagccctgaacctgaatttgtcactaaatctatcggtacttctgtaactggaacagctggatttttttccttccagtccgcaatacttttctctactcgctttgctaaatctggattagatggtgcatagttatttgaaccagatgcttcagccttatattcaatactagaaacacgcccttgaaaataacgtggatccgtgaagttttgaccaattaatttagaaccaatcacttcatttttatcattatatattagacttccatccgcattatccttcatcactgcttgtgcaataccagtaacaataagtgggtatacaagtccacacaacactagaaatgtaaaagtaatacggataattggtgatagtatactttgtttcttctccatctttttcccctcttccttatataaacaagccgacaatcatatcaattaccttaattccaatgaacggaacgataactccgccaagcccataaataagtaagtttcggctaagcaatgcattagaactcatcggtttatatgcaatacctttcatcgctaacggaatgagtaatggaataataacagcgttaaatattaatgctgataaaatcgctgacagtggtgatgttaatttcataatgttcaatgcctccatttgcggaatcgcaagtgtaaacattgctggaatgattgcaaaatatttcgctatatcattcgcaatactaaacgtcgttaaagcacctcgcgtcattaacaattgcttaccgattcctacaacctcaataattttcgttggattcgagtctagatcaatcatgttcgccgcttctttcgctgctgtcgtaccactgttcatcgctaatccaacgtccgcctgtgctaatgctggagcatcatttgtaccatcacctgtcattgctacaagtttccctttatcttgctctgctttaataacagcaattttatcttccggtttacactcggcaacgaattcatctactccagcttcttttgcaatcgttgctgccgttaacggattatcacctgtacacataaccgttttaatccccatttggcgtaactgttcaaaacgctcacgcatacccggttttactgtatcctttaaataaattaaaccataaatacgattatctactgcaactacaagtggtgttccaccctcttttgaaattaagcctgctttttgatttacatctttcggaattattccgccttgtgactcaacccattcaataacggcacctacagcaccttttctcactttcgttccgtcttgtaaatcaacaccactcattctcgtttctgctttaaacggaacaaactcaccttgttctgcaagttctctattgtatgatatagattttccctgcacatactcgataacagatcgaccttctggtgtttcatctaaaacagaactaatagcggcccactttccaacttgctcaatcgtttcatttcctacaggtaataatgtatgagccattcggttcccaaaagtaatcgtacctgttttatctaaaataattgtattaatatcgcccgcagcttctactgctttccctgacatcgctaacacgttaaattttgtcacccggtccatcccagcaataccaatcgctgatagcaaaccaccaattgtcgttggaattaaacaaactaataatgcaactagcacagcagtatcaatttgaaaccctaaataatttgtaaaaatcggcaacgtcacaacgacgatcaagaaaataagagttaagctcgttaatactgtatttaaagcaatctcattcggcgttttttgacgagcagctccttctactaaagaaatcattttgtctataaatgattcaccaggattactcgtaatgacaattgtaatttcatcacttacgaccatcgttccacctgttacggaacaaaaatcaccgcctgcttcttttataacaggagctgattcccctgtaattgcagattcatctacagatgctaatcctttgattacttcgccatcattcggaatcatttctccttgttttacgataacaacgtcaccttttgtaagatcagttgctgaaacttggacaatgtctccattttcttttacaacatttgcaaacacatctttcttcgactgctttaaagaatcggcttgcgctttaccacgaccttctgctaatgcttctgcaaaattcgcaaataaaactgtaaataatagaatgagagaaactgttatattaaaccaacctggtatactactagaactacttggaagaaaagataaaatgaacgtaatgataaatccaatttccacaacgaacataatcggattctttatcatgactttcggattcaatttcgcaatggattgcttcatcgcatgtgttacgatatcacgatccatcgttttcgcttgtctaacttcatcttctacagcatgtatttgtgactcatttaattgtttttcttttactactaccggtctcatcatttaccctccattacttcaatgtaagaaattctgcaattggtccgagtactaacatcgggaagaatgttaatgcaccaacaattacaattgttccgatgaagatgccaccaaataaactattatctgtacggaacgttccgactgtttctggcactaccgttttttctttcaacgaagctgccacagctagcatcgtaattaaactgaagtaacgtcctaaaaacataactaaaccagtcgtaatattccaaaacggtgtattatctcctaatccttcaaatccagatccgttattcgcagctgacgatgtatactcatatacaacttgcgttaaaccgtggaaaccggaatgagaaatagcatccgtccctaaatttgttgaaagagctaatgccgaaaagcctaaaatgagcaatggatgaaataaaatcgtgaccgcgattaatttcatttccttaccttcaatctttttacctaaaaactctggtgtccgtccaaccattaacccagatataaacaccgcgataattgcatacataataatgttcacaaagcctgctccaacgccgccatatactgtatttaacatcatatttacgagtggtactaaaccaccaattggtgttaacgtatcatgcatcgtattaacagcacctgtttccgcagcagtcgttactgtcgcataaagggaagaaaatactgttccgaacctcacttcttttccttctgcacttccttgtacatgctggatacccatttcatttaatactggatttccatgtaattcagatgtcgtaattgtgataaatcctagtaaaaacatcatgaatagtgatacgaaaaggatacgaccttgctttttatttcctaccattcgtccgtacgtaaacggaagtgcagttggtaataacatcataagcatcatttgcaaaatattactcatttgccctggattttcaaaaggatgcgtagagtttgctccgaaaaatccaccaccgttatttccaagttccttaatggacacgaatgatgcaactggtccgcgtaatatactttgctttgcaccttcaatcgtatgtgctgtaacagccccatctaacgtttgcggtacaccaagagcgacaaagattaacgccgtaataaaagcgataggaagaaatactctcgttaacgctctcgtaaaatcaacgaaaaagttaccgagttcttttccagcgagccctcttataaatgccataacgagcgctaatgttgttgctggtgctgcgaacattaaaaatgtaatcccgattaattgtgataaataagataagccattttcaccgctataatgctgtaagtttgtatcagccataaaactaattgctgtattaaaagcgagcgtaggctccattccttcaatatgcgctggatttagcggcaatacaccttgtaatctgaaaatgaaatatacaataacaatcataaatccgttgagtaaaactaatgataatgcgtactgtttccacgtttgattgtattcttttacacccgtaattttaaaaataattttttcaaaaggcccgaatactttatctagctttttgctaccttgaaaagctttttctaaataaatccccgttggctttgctactaaaataaacaagagcattgtaataatgactgcaacccaaatcataatgaatgattccccctaattaaaacttctctggatttaataatgcatacactaaatacactgtaattgctgcgacaataaccgataagacaatcatcatgattgctttccttctttcacaactttatctgaccaacttgcaagacttgccattgatgcaactaataaaataaaaatcccgaccattacaacatctaacatagctatccctcgctttgtttttgttaaaatttaccatttaaatgttaaaaaagaacactgagctctactcagtgttcaaaaaatgaacaacaaaaagtaaacctcctctctaaacgcttacgaggttagctgtcggattcgggcctaaagagtagccctactttcaaaactgaaagattcaccccaagtgacgatgcacaaaattggttcccccgctccatttctggaactcagcgattttaggtttttttggaaattttatgaatgatttatgagagtaaatatactcctctatatttcacttgtaaaggggtaaattactgaaaataataatatttacatccatttaaacgcttacattaaaggttattactattatttcatctattttctttatttctcttctcttttcttaaaaatgaccttttaaatatgaaataaaaagagcgaatgagatgaagtgcatagcttgttgcactcagcattcgctctttttattcaacctttattctcctcgtaaaaatgcacgtaaatttctcccgcgaatataaacttgtgtcaattctgcatgtagctgctcatactcggtaatatccacctctaaatacaaagcatcttttgatggtaatataatatacggccctggaaaaaggggatcgatctgaaccaattcttgaactcgctctaccgatactgcccaacgatttgctatatctccaagtaatagtaccttcatcatttcttcccccgccctattcaaaaaataaaaaagaaatattatcacaatttgtaaacacgacaaacttagctccaattgtttcatagagcctcgctggatatcgtttattccttgtaacaatagtaataggtgcttgaaaagaaaagcgaatgtgttctgtgaaaaaactaacgattgaaagctcatcccctagtaaaatcaccttcttaatacactcacaaatactagtaaagtcctgctccttactgcagctataagtccaatcaaacccacaattcctaacttcagccgctatctcttcatttgctgtaaaaataattaactcatgttgaaatgatactagatctcttaaactatctaccttactttcttctccaacacaaataagtgttagttccatgtacctcatcctccttagtataaaagaaatcaaacatagattgatattctcctatactaatcagatcgatgaagtgatgtatccatcatggcaccgtcctctctcaagacgcttacgaagttagctgtcggattcggactttgagagtagccctactttcaaacttgaaagattcacccctagtgcctacgcacaaattggttcctccgctccatataattggactcagcgtttacaaaaaaatgtattctggctgatatattactcctgtattttgaaaaagtaaacagaaaaaaagccagttataaaactggcttttcacttacctatgcacgcattctattcactttatatgcaaaatgattcgtcggcccatggccactaccaatattcaatggctcttcaattgctatactaataaatcgttttgcttcttgaacagcatcttcaatcgagtatcctttcgcaagtcctgctgtaaccgctgaagcaaatgtacacccacttccatgcgtttgctttgaaggaattcgctcgcttctaaactcaataaatttttctccatcaaagaggaaatcaattacttcattcccttgatattctgcatgtccgcccttcataagcacatatttagcacctaattcatacaatacttttgcagcttccttactatcttcaacattatgaatctccatcccagttaacacttctgcttctgggacattcggtgttataacagttgctactggtaataaatattcttttaatgcttgaactgcttcttgctgtaataatgatgcaccgccttttgcaatcataacgggatctagcacaatattattccagccaaactttttaatttgttctgcaacaatttgaattatttcactactaaataacattcctagcttcactgcatctggtgttaaatccgtaccaattgaattcaactgttctgtaataccttctaacggaacaggatataccccttgaacgccaagcgtgttttgagcagtaatcgccgtaatagccgtcattccgtatacaccaagctcttggaatgtttttaaatctgcctgaattccagcaccgccgccgctatcagaccctgcaattgttaaagctttattcactttcatcccactcatccttttctatccaaaatagcgatgataaatcgtttttgcttcgcttatatctttcgttccatgtacgagcacacggccatctttaaaggcgactaacctcttgtcttcaatagaaaatgatagtaaatatggatttatatttaaatcattcacacgaccttccaacaactctttatattgttcaaaatttatttcatctttatgaggtggtctaatttgaactgtatttcgcccgcataaaactgctgtttttgatgtgttctctttatttaaatacggatataatgcattctctccgcatgaaggacaattatgctggcgaagcttttgcacattcatacatgaatactcattcttccacatatcaaacgatacaagcccatctcgaagtgattcgtaatcttctactaacagtttaagagcttctgttacttgatgagaaacgacaagagatacagcaggtgatataatacccgctgtatcacatgttgccccgccaagcggaatcgactgtaataaacatgataaacatggtgttttactaggaaggattgtgtaagaaagaccgtaactacctacacatgcaccgtaaatccatggaatagaatatttttgtgctatatcatttacaataaagcgtgtttcaaaattatcagtcgcatcaataattacatcaacatttataacaagttcttctagctcttcagctgttacatcttgaacgagagcttctattgttacatcgctattaatctcatctaaacgttttttagccgctatagcttttggaagattattctttacgtcgctctctgcatacaattgttgtctttgtaaattactccaatctacataatcacggtcaacaattgttatcttgccaacacctgctcttacaaacatctctgcatttgcactacctaatgcacctgcaccgataataagcacatgcttttctcttatcttttgctgtccttcttctccaattggagaaaatagttcttggcgagaatatcgattattcaactacgctcattccttctaaaggactacttgcagttgcacaacgcttacgtgcaatacgacctgcttcaaatcctaaacggcctgcttcaatacttaatttcattgcttgtgccattttaataggatcttttgcacctgatacagctgtatttaataacacgccatctgctcctaattccattgcaaatgccgcatcagctgggctaccaataccggcatcaacgataactggtactgtcgcttgttcaataatgaagctcaaatttaatggatttacaataccaagtcctgatccgattggagatgctcctggcataatcgcatgcacgccaagctcttgtaatttacgtgctaatacaacatcatcagatgtatacggaagtacgataaatccttcttccagtaacatttcagatgcctttaacgtttctaccggatcaggtaataacgttctatcatcaccaataacttctacctttatcatgtcacaaagcccagaggcttttgctaattttgcaatacgaacagcctcttcagcgttttttgcccctgctgtatttggtaataacgtatattttttcacatcaagtttctctaataaattaggttgctttgcatcaaagatatccatacgacgtactgcaaacgttaaaatttcagcttcagaaacgtcaattgccttttgctgtacgtcaaaatcagggaatttacctgttcctaataaaagtctagaatgaaatgaaaatggtccaatgtttaacataatcaaccgcctcctacgaaagttacaatctcaatttggtctccatcaaaaacagatgtatctgtatgatcatctttttgtaaaatatctttattacgctctactacaacaattctgttatctaactctaaatgtgtaagtagctcagctactgtttttacactcgctggcacttcaatttggttaccattaatttttaaattcaaacttccatcccctttctaaacgcttctagaaagcaatgaatctagcaaatgattctcttgctttccttctattaaatcagccatatattgaccagaaataggacttaataaaataccgtttcgataatggcccgtgcaagcatataaaccttttatttcttcatgctctcccatataaggagcttcatgattcgattgtggtcgtaatcctgcccacgtgctttcccattctgcttcttttaaagctggcaatattgtataagcacgctctaatatagaagttatactttctggctgcacagttttattgaacgtatgtggcttcattgttgccccaattacgtaacgtccaccgcgctttggagtaatgtaaaatctttcttgaaaaataggtgcttttaaaagtttttttctacttcttaccgcaaccacttctcctttaactggatatgtaccccaatcacggtgaaaataacctagtaacttcgtgctccatgaacctcctgcaataacgactttctcacatgtgacaataccttcacttgtaataactccagtcactttattattttcaatacggatatcaaatacttctgtctgttcatatatatcagcaccggaaattgccgcagaatgtgcgaatgctttcgtaagctctggtgcaataacatgaccgtctttcggataatatactgctcctataatagattcggatagatatggctctttttcccgcacatggtctcccgttagaaaataagaatcttcacctgttttctgctgccaatccataatgtgaagtattctttccttctcatcttcattttgagcaatacgataaattcctttttcttcatatccaatatcaatacccgtcttttcacgtaaaactgctgcaagttgtggaaatatagctcggctttctctagcaagttcaaatagcggatcatacgcatcccattctgcctgaacaccaagtaaaccagcagctgctttggaagcttccgatgcaatactttgcttctccacaatcgctactttatgtcctctttctgctagaaaatgtgcaactgaactgccaattacaccaccaccaataatcgctacatcatacttctcacacatgtttttccgcccactttcttattgattccttataagatttcgctttgctatacgggttactactacttacaattccagacataactgctataccacttacaccgttagtaagaacatccactgtgttttgtggggtaattcctccaattgctgtaatcggtatagataaacaccttgcaatgtctgaaatttcttcaagccctctcgctggcacaccttttttacaatctgtcggaaatacatggccataaacgagtgaatccgctccatttttaaaagctactattgcttcatctagcgaatgcacagaataaccgacatgcaaatacgaaaacttttctttcactgactttacatctgtacttcgatatcctagttgaacacgaggaatatttaataaaattgcaatatcaattcgatcgtttatgacaattttagaagccggaaagccctccattaatagactttccacaccttcatataattccttcgtactcttctcacgctcacgaatatgcaaataatcaatctcactctcaatttgcatcgctacattcactaactcttcgaatggcatatggccatttgagattacgtggagctcatttttcatattcattcgcctactttaaaatattttcgaatagttcatcggctgggacggtttctttcgtcattcctttgtccttcagccacttattttgtttctcccaagattcttttgaatctgataaaaatggctcatctttcgtttccatcttctctaataaaattttcatactttccttttcaacttctggcacaagtgggaagttttctttttcttgatgatttaataaaatattcaatgcttcatctgggtttttcttcatgaaatcatagccttttttcgtaccgcgtaagaaagcttgcaacgcttctttatcttttttcaacgttttatcacctgttacaaacacaagctcatgatagtttggtactccgtaatcagctggattaaagtacgctggttcatggccttcatgacgcataacaggtacttcatggttaatgtatgcccctgttaccgcatctactttcttcgtaattaatgctggtactaaatcaaagccaacatcaactactttcactgtatcaggattaccaccagcttcttttaccatcgtttttaaatacatctcacttaaaggtgttccagagtatcctactgtttttccttctaaatctttcggtgattgaatgcccgctgatttcagtgatacaacatgatttaatggtgaacgtacgacagctccaattgatttcactggaatttgctcattcgctctcgccataacaacatctggctgataatacaagccaactgttaccttccctgctgctgccagcgttaatggatcagtcggattagaagggaatttaatatttacctttacaccttcttctttaaagtatcctttttcaattgctgcatagataaagctatgtaccgcatttggataccaatctaacatgactgttatttctttctcttttttacttttgtctgatgctgaattactcgaacatcctgcaattattgcaattaataatgtaaacacaaagatgcgctttaaaaatttcatgaatacttcctccaactaatgaatttcttttctaatatggaaataattacgacgaagaaaatagctaataatgataacaatacaataggtgcaaatacgccagctccatctaactgcgtcatcattctcttactgaaatatccaagcccagcttgtgcaccgagccattctccaattgctgctccgataacactaagcggaactgcaatttttaaagctgagaaaaaataaggaagagcagacggcaactttaatttaagaaaaatatctctttttgttgctccatatgtaactaagagctcctcccattcttttttcgtactacgcagtccatcatacgtattgaccgcaattgggaaacacgtaattaaaactgtgacaacaaccttactccaaattgtgtatccaaaccataaaacaaatagcggagcaagcgcagtaatcggaatcgtttgtgaagcaactaataatggataaaatgctctctccatccatgtactcgcattcattaacatcgctagcccaacacctaatacgatagagataacaacacctattaaaacgacgtataacgttgcaggtaaatgaactgtaaataatatgtcttttagtttccatatcttcattacaatcgcagaaggtgacggtaaaatgtacatctcatctacaattcttgctcctatttcccacacagctagtaaaatactagaaagtgtaatagcaggaactaattctttcaatcggttcatcacacaagtacctgcctttgtaacatactaagaagctcatctttcagcgctaatacttccggtttatataaatcttttcgtgttctgttatgatcaagcggtacagtccgctcagtcaaagtcgttatcggctgctgttccactactaaaactcggtttgaaagaaataacgcttcttcaacatcatgagtaatgaataaaattgttttttcccactcttgccattgttcaaacaaccattcttgcaaagaggtcttcgttaaagcatccaacgcactaaatggttcatctaacagcaatatttccccgcctgttaataaagttcgaataaaagatacacgttgtctcataccaccagataaatctttcggatattttttctcatacccttgcaaaccaaatttatgtaacagttcctttgcctttacttgtgcttctttcttctgtacaccttggcactctagcggcagggcagcattctcaataattgttctccacggcaaaagcatatctttttgcggcatatatcctacaggatggtgctttgtttctgtcagttctatctgtccagtacttaccttttctagacctgtaataaggcgaaataaagtacttttcccacatccactcggtccgataatactgacaaactctttctcatgtatagaagcatttaattcatggatgattggtttctcatcgtaatgaaaagaaacattatgaaactgtagtatgttcttgctcctcaaatccccacatctccttacgataggacatatcccagaataaatattcaaatcgactggaatataagaaaatctcctctaatctttctagttctgtctcagactttcccactgccatttcatttaataaatctattaaccaaatacacagattaccgtattcttccgaactatatccttgaatccactcaccaaaaaactcatgatctcttgctccaggaatatcatttaaacgctttccaatttcccaatagctccacatacatggaagaagcgctgctattaattccgcaagtgtgccattttgagatacagacatcatgtaatttgtataagctaaatttttagcagatggtttcgcagactctatctcctctatagaaattccaagtctttttgcatattgtttatggattgtcatttcgccatttaatattccatcaatttgttcagcgaactttcccattacttgtggattcgttgcttttacaacaccaatcgcatataactttgcataatctagcagatataaataatcttgaataatataatactggaatttatctttttctaacgtgccatctcccatacctactacaaacggatgattatgactcatctcccaaaccggttgcacagtttctaataatctatcgcaaaatttcatttctctatcccctttcaatatatgtatctaaataaaaaaccacttctatatataagaagtggttacagcaaataaagttatacatttattcgatgttccacttcccttcgctagtattacctagatcaggtgttgtaagggttaaggattattcctctctcagcaaatcaagcacccctagtggtttcaatatgaaattttcaaataaaaaagccccgtttctatacgcaaagaaacggggactcattgttagtgtccgaattgcttccctacgctagcataatctagatcaggtaataaaaaggatcaaaggcttacggcctactctcagctggcaacaccagctctcctagcaaactataaaattatcactgtcagtataacaccctaataagacatcatcaacttttttaattttcttaattattaacagaatatcaaatttatacaatacatacattctattttagaaaataaaaccccaattaattgcataagaaggaatcattatcctcaaaaaatttatttttatattgatttcatattacatttatgtgaatacacccactatattatatctttatactataataaaattacaactatacaactagaggaggtctctattccatgaatatgaaagctactgctttaacagcaactactgtagcgattgcttctttacttccttctatgggtgaaacaaatgtacaaaaagcaaacgctgaacaattatctaatattaaaactgggtatgtcaaagtcgatcaagtagcattacatacagaagataacgtaaaaagcacatcaattgatacaattcgctttaatacaaaagtgaacatccttgaaacaactaatgagtggtataaagtatctgttcataataaagtaggttatgtacaaaaagatgctattttactaaaaaacaaacttcattctaatgatcaatacatcgttaatgctaatgcattaaacgttcgctctgaacctaatttagaatcttccattttagatgtattaccaaatggcaagtttattaccgttcaagaagatcaaggcgaatggtataaaatatcgcataatggccaaacaggttacgtacaaaaagcattcatctctaatggttcacaacccttagtaaaaggaatcaccgttcaaaataatacaaaatatactgttgcaacacctaatctaaatgtacgtagcaacgctagtacaagtagcgctctactcggttcattacaaaacggtacacaagtacaagtagtagaaactgtaggaacttggtataaaattcgttttggcacaggatacggatatgtagcaaaacactatgtagtacaaaatcaaccacaagctaaaactgatcaaccttcatcaattccagctgctttcaaattccctgctcaaggaagaattagctcaacctttgatatacgctgggaacaaatgcattatggtatagatattgccgctccaggaaacgtctctatccaagctgctgctgcaggtaaagttgtgaaatcttattattcagctagctatggcaatgttgttttcattgcgcatcaaatcaatgggaaattatatacaactgtttatgctcatatgaaggatcgcactgtacaagctggtgatcaagtacaaactggacaattaataggtcatatgggaaacacaggtcattcatacgggcagcatcttcattttgaattacataatggagaatggaattttgaaaaaacaaatgcagtaaatccactgccatatttagttaggtaaattgtatgccacgcaatatacctcttataattgaatacgtagcctttttaggtttaatctgttgtttaatcatttacaatacaaacattgtatttttatctattattattgcttttgttgcattagaaattatgatggaatcatttcaagtgcaactaaaacaaaaaattgcccatatttataatgctatttttcttttgagtgctctcataacaaatataattagtaatggcttttatttatctactgtatttccagtattctttatggctgttttattatttgtagctagatatattaatgtcccttataaccaaaaacaaaaacaagaacaagaagcttagaaagaggagacactgtgtaccaatctttcaaagatactccaataaaatacatattgaatttgtataagaaagccaatactttttttgatatacaaggaagttatactgaacaacttctcctatatggaatgttttttcttgtcttaatcactttctctttgttttactaacaaaaaaggatctcacataaactggagatcctttttaatttatattaatttttcatatcgaaaatattgtttatccacaagcatatttttcataaataaagctcagattatattttttctctaagctcattcgttgttcgtcatcgcaccaatagaaaagaatatcatgaatcgttgcgtaacgcttatttttaagaaatagcctaaagaatgatggtaaacaatcatgtaattgtataaatatataattgcgtagtgtttcttctttatattcaatgcccttacaaatatacagtaattcttcacaataatatgcatgctgtggaacttgtatcatttcgaaaaatggcacataagatagtagctttccaataaaatgaccgtatcgatccattactcctatcgtcatatgctccatcatttctttcatcacatataaataatcatctacatgcgttgtctttaatgggtctaaacgatcggaaatttgagataatacagctctttgacatgctaaaactgcctgactaggtccataatatgataggaaatctgtacacttacgatatttccgtaataaatcatgtgtatacaaatcatatacaaaagtattacaatacattgctaaactcatcatatcactatttaattgctcttttgataatgatttcgctctcttgcacatataaaagaatgtaaattccaatacttctttatgagataataaatgtttacaatcggttatacacttctcattaaatttaactctatcccaaatttcaatatccctatctgtcaattcacctatacgatatttaataattaaataatttaaagcaactgattgcgtcaaaagatcccatgtttcatattccaatgaagtatgaacaaactcagctaatccttgcgctatcataaaatcatttgcctcttcataccaaccaatctcttggcataagcgaagaatacgcactaaagttggaatttcatctttatgaaactgcggtaatttctttgctttattcatgccatatacgataaatgccgctaaattttcttctttataaaattctttctctttccatactaatatagttcgttctttcccctcaccttttgggtgacaaggtacaagcaaagaaaataattcagcgaaattatttggttctatatatgtatctgtaaccaaattccaatttggatcgccctgtacagccttcatataattccccttcccttttcatctatgtaggaaatattaatttattatcgcaccactaaaaattaatattgttatattcaaaatctatcataatacttatatctatcagtatatcatcttttctcttattaaaaattaagaataacaaattttaaaaaaatgtcgaaattattaaccgtatccttattatataatgtctcagatacatcacgctaacatattagtttaatccatatatgctagaataatgtatctgaaatttatatataatttagctctttatgagtgaccattaaactctcggttaattaaagtttcaatttactctgtacgctctgagatttcactcaaggcaaatccagcttgatcatctgctgattcccttatagctaaatctcctagtgctaacatgccaataagttgaccactatcaactactggtaatcgtctaatttgatgctgtgccattagctctgtagctttttcaatagaatcatttggagaaactgagataatatttgttgtcattacatttgtaattttattagatccaggatgtttttcagcaatccctcgaacgactaaatcacgatcagtaacaagcccaacaacttgctcattttcaacaacaggaattaatccaactgattcttccttcattttaacagctgcctcatatacattgtctagcggtgtacaatgtacaatatgggtactcattaagtctctaactcgtgtcattatttatttcctcctttttatacataccatagcttttccaaaattcctttatttatttctggaaagtaacgtaataaaaaggattaacaaaataaaaaagagccagcataatgctgactcttttttgtatgacccgtacgggattcgaacccgtgttaccgccgtgaaagggcggtgtcttaaccacttgaccaacgggccatggctccgcaggtaggactcgaacctacgaccgatcggttaacagccgatagctctaccactgagctactgcggaataatatatggtgggcctaaatggactcgaaccatcgacctcacgcttatcaggcgtgcgctctaaccagctgagctataggcccatatactttacaggggcagtaggaatcgaacccacactggaggttttggagacctcagttctacctttaaactatgcccctaaatgatgccggctagaggacttgaacccccaacctactgattacaagtcagttgctctaccaattgagctaagccggcataaaaaaaatggtggctcgggacggaatcgaaccgccgacacgaggattttcagtcctctgctctaccgactgagctaccgagccttttggtaagaaagataattgtttagtcatgtaagaccactcctttttatttttaaattacttttgtcttattgctccacgtcttcgttcatagcaaggtctatgcatccccattaaatcctcaatttcacgagtacttaatttctcttttcgttttttcttctttttcttctttgcttgattcgattgctttttccattcacgtagctgatcctttaacaccttcatttccccatctcccttttcaaaataaaaaggacacctattcctaaaacagctttaattgctgctttaatgaattggtgtcctctagttttctagccggacaatattgatttttaatttactttaaaagacttgcttttgagttttctttccaactctcacctttgtgcaaatgaatattccatgcttgtggtggtgtaaaacctatatcttgcagatcttttatattttgcggttcttcaaaagtgcacggcacacttatttctttagtaaagtcaaaatcataattacctgtttcaccaggagaagtatccgcccaatcaacaccaccctttatttccacgctttctccatcgggtgtttctaaatagaatttcacaccttctacactcattcccattttcccaacctcactttctattcaaaggattattttgtttggttttaacttctacattcccttaataatttataattttgtataacaacgttttgaaatttattgttcatttctatgtgatcttttgctttttttaacatgcgcccatttatccttctattaaactttaaaattatgctcccatttccgtttcctttataacttccaaaagtataagaaaccatatactcaaaatatcttgctctcatttccctctacctccatatttttctcaatatatcctaacaacatatcttccaattccattacacatgaattaaattgttctgggtcatcactattcatagttttcacccatttaattatttctttttttaatatttgttctttactcatttcttcttcctcccttgaataaaactcaatattccgtcaatactgtagacaacccattaagttactttctccttgttcccccttggagaaccagccgaacagttagcttttgctagctgctctttttaatggttcaaaatctctaaagaaaacatcttctgataccggtttgatgtaaccgtcgggaaatttagcccaacagtaccaatcattcggattaacctccattaaatgaacaaccgtgccatttttatgcttgtatggttctggtggatctatgaccatatccattctccttttctacaaaatgaaatttttattaattatttctcaacaattaacacatagaaatcccaatccgtttttagtaatatatagttaatctctatatgcttagctttgttaaaaggacccacccccttaatgtgggtccttctttttaaatattttatactaaaatagcgtttttgttcaaattctttcttcttttaactcatactgcaattgctgattctcttcccgtaataatgtaatttcttcaaccagacgtggcactgaatgaaaaacatttaaaatgttatctaagttttctaaaacgaaatcttcatcatcgtatttatccattaaatcgttgtacatttctattgtgagtctaagatcattcagttcttgcaacttttgtaaatccatccctcattcttcctttcaaataacgattttgtattaaatcacgaactatcactggatccagtagtgctttttgttcgtttttcaaatagagattttgtattatttttgtgcgctcattgctttttcttctttaacacgtttcttattacaccaatagcaaagatttgggcctttatgactcattgatggtctatataaagttttaactggcttgctacatttcggacattcttgtttatcatatttcacgatttcgttcccctctcaaataaagattttgtattacttaatgagtcacatcactaatctcagcagttatccaatccgtatcaacatcttcaattggtggcatttctcccaaacgatcaaatgctatctttttattttttttaagtaattcatctaaattactttgtcttttaaggattcgctttaaaccttcacctgctttttctaaaaacctcattgtatcttccttagtacttgttgccatccaaatcctaaaatcaatcggaatgctcatagcatgtacaccagatgttacttctgaaatattaatagatttacttaatggaatagcacaaaaacgatattttcccactttaatttcatgaccaactgcaggtacccattcatcaaatgctagataaaaacgttgagcttgctcattcacttttatttccattccgtttccctccaaaataagaattttgtttagttttctaatttgctaatccgacaataacgcatggtgtatcaccaaattctttctctttatataattcttctaatgtttgatatactggaaatccgacacaagaaacttcaattttttcatctggatgcattgtttctaacaccacgtcatccatatatccgcatccattatgacaatgcattaaataatatcctgcagcttcatatttgctattggccaggataacttttatatcctgatctccgccaaaagacattttataaaattccatatcttattctcctttttcttgtgccttttcaattaaccaataaattgtatctacttctaacatcactaaagggttactagtaaatgcattttcaacagcttcgtcacatttagccttaattgattctattgaaggttccatattttctccctttctattcaaataactattttgtttagttttctaacaagctaatacgctgcaaatacttaactgagaagtaaccactaaatccttctaaaaacaccacttgcgaaccactatttgctttaaattgatctgttctacaagtccaaacttttccctcataacgcttcgcttctaagcaagtgtgcatcactaccttgtcacctgcttttaattcttccattgcaccgaatactgtttgataagcttctttatattttcgttttataaattctacttgcttcaacgttctaacgtttgcaaagcgacctttcatatagtccaagcaaacatgatctatatcttctggaggaccagggaagtaagtggaagattgcttccctccactcgttgtataagtcatctcaaccccaccatgttcattctttatcatttcaaatgtaggtttcatttccgttccccttttcgatcctttttaataaaaattagttgaaacaactactgtaggttctacactcactggtatcaactttcggtagtatctttccccatcgatctcaattcccgtttttcttgcacccttatataaagaacttaaacgtttaaaatcactttcagaaattagtttccatacaaatatgtcattcattgattcttcaatattcctagtatcataacgctcccattcccaaaactttttagataaccattcatctaaatcagtatgactcgtgaatgcatatgcttcatccccacaatcatcttctctaaagacaaagtaatactccgttaaataatcttggtgtttactttccagtaattctttaaatgctctccaattgcttttaagtccgcctaagtctaacgcttccacctctaattcctcccctttgttttttattcaaataacgcttttgttataaaactaatccatcattatgctttccactttgttcatggtggcttgcatatcttgatacgcacctaatatatctttagtcttataattacgtttacctaaatttatgtgtacttcccatctaatcacactgaatctatcttcgctttttcgttgcttttctaaacgaataaccgcacgtctacgtaccattttcactacgattcctcatttcttaacaaaattcaaatttggtcttactttaatagatctgaatccacacttttccctctgtgttgatttaagatagtctctaatgcaattgctgttccctcattcgcaatccattgaccacgatagtaacctgataaacctaaatctccaacttcatacgctttgtctgattcctttctgttttccatcgctgattgttgcaattgatttatatattccttgattacttccttcattatctccagctccttttctaattccttcagtttctcacaatcgatttctcgaatcgtactgaggcattttttccagttctaattactggtgttgttacagccttttctatatcccattttctagtgattactcttgtcataaacgtgctatagccaattccattgggcttagctcgttctaaccacacttttcccaaaccttttctttttatagctggtttcgtagaggcctcttgatatccccaaccgctatttaatctactgtaaaatgtagctgcgtttatcccattcgcctcagcgattctacgccatttcgtgtgcactccctcaaacttgttatgtcttacgcttcctggcggtgctgttaatgcttcttctaaatcccaatccgcttcataaacacgataatgtaacgttttcctactaattccattagataaagcccttgcatattcttcatcggttaaccatcgatttaaagccgccaccattctccctcctaatcgagtgccaaaaattctgtcctagtacgatttgaatgagttatcctaatcttctgaatacacttgccgtgctcttctaacgctgcattccaagcttccacttcagttttagcatcaaaacaatccattttttgtcgttcttctttatcgtaaaaatgcacttcaaaacttggatttaaaaacttttcactggtgcttatggcgttgtagcaaaaactccctattacatcatcaatcgataattgcttcataatcgcatctccagttatttgattttttccgtatacgtagttgatacgcgatcaaccttcccactttgccacgtaatgatttgttcaccaaatcctgttgctggaggattcagcggagtaacttcaccatttttgaccacgtaaattttattatcattaacatcgatttcaactttcgtaggcttcatacgactgaaatccccctttttcttgttagctaactttttgttgctgattaagttgtaaatcttgcttcattgcctcaaatttaattaagtacgctttccaacgcttatcattttcttcttgttgttgctttgctacttcacagttacaaccttccgttagagttacacctgaataaatttctttacgaataattcctttatcacgacataatacacacatgattattcctccttcttagaaacctaaatttgcaagtctttgatccgctgtggtgaatttcaaaacctttgaatcacctaataagcgactaacggttttagcatcatatttattaaaaagttgttttccagtaaagtttgtagtggtaaaggtactcattccttgtctagcatttgataccgcatataaaagacgttggatgaaatctgaagcttgtctatttgaatctgtcgaaccactttccgccccaagatcatccaacactacaaaatcagcttggccaattaattgaacaaaatattgaagtgtatatttactgctcttatcatcgaaagaatccataatcatccttgttattgcttctaattccacatataaacaacttttcataagatgatagttttcttctccctgactgatatcccagaaatattgatttaattcatgaagcatgctgtatgctaagaaactctttgccgtcccttgatttcctgtaaatacaacttttctaatttctccgttctttaaatcctccaaagtttcttctatagctttcttgtgactaatcgtttcatcacacccggttctgtaatcagataatcttgaaagaggaattttcttatttgtaataacactagccttttccagcatgttaaatttttgcaaacggttaatttttttatagtgagcattagcctgttcttctaaaactttgttgttttgttcaactacgcatctagggcaaacaacttgtcctctgtattcaatcatttgaactggcttaatgattttttgtccacctatttcataagagtgattcatacattgatcagaatggtaattcaccttcaattccagggattctgccagctttttcattggtgttgccatttcgtttcgctccttttttacctttgtttttaaactctatttctgctgcattaacatcagctaaagtacgaatatttttattaacccactgttttaaaatgccctcagcataattccatttcttctgctgtttcaaagcacgttccattgctgcttgtacaagttcttcgcttgtatcatttacccattgcgaaatactttcggctatgaatgaatttaaaataccgaaattattttcgtagaaagagaagatgctactactacttacattctctgtagtactctttgtagtaatctctgtatttgtctttactttgaagttaggagactccttacttgtaagtgaagagggtcttgatttagaagtaaccaccctatttacttctaagtaaccagggtcttcttttatctcttgatacatactagaaattttccttatttctgttggtacaggttccacaaacattacgttattcaaaattttcccatcagcgctaatagtcctaaactcgattttgacaagtagcatatcagttaataaatcacatgctcttttcacttgtaattttgtaaatccaaaagtatcggctaactgttgataatttttttgcaacttgtccgctttaaattttttcttgtaagttactttcccatctatttcatctcgaataactgtaggacgataccaataaacaatttcactcaataccataatcgctacaatgtgaggcttaccattactaaaagtgatgtaattaaaccattcatgatctaccacattacctttgaaatttaacccaccaatttcagttactacgtttgacataaatatttacctccttgtacaaaccgccacatatgcttgtccgcttttgataattctttgaatttcataatgtggataaccaacactgaaatactgttcaatcatttgcattaattcatcgttgctttttgctaagtcccaaaactcattaggtaatagcacttgatattcaattaaatccatgtactatttccctactttccgtggtatactaacatcaagtgtttttctaaagggacccattgccttgggtcttttccttttgttcaacatcactccatgcccatcgttttattggttcgtaagtaatgtaaagcaacaatgcactgcatgcgataaacattgcgaatactactaacgatgttgtatcttccactaaatcacttccccttctgaataaacttagcgtatgattagtcatcaatctcaactattacactttgaatctttgtttttaatgcaacttgttgtgtaagtataatagaagatgctggttcaccatcttctattaaccccttaatcatacgactcgcttcaatttttgattcacactcgtaagcgtttaaaccatatcctctgttatgaagtacaaaatatttagtttctttcattttcttttcctcctactgaacttccgccatatttatttgtgaatttacaaaagtaatttcttcacttaatacaattggtaatgtgtattcttcaacgatttttgatgctaactccaaatgaccacgtttaatcgctttatgacttgttactccaaactctctatacaactgtctatagatgtctttataaacttttgatctcaaaccacggtcttgataagcattagaattcttaccaccaagtaatacaacaccataacgttttactgcattggatatttcatcgcactctactgcgaataatggtgcgttttctcgtaagtctttgacatctgatttgatgtgctggagttcttgcttttgtccttctaacgcatcaaatgttagttttaaaatactcattgggtctgtagggatttgtttctgttctctcatattgaaatatccatctacaaactgatcgtataattcccatgctgtatcatcttcaaggatttttaaaagctttgcgtatcctcgttcggagaggaggtagatgttcttcgattgattaaatgattgttttgtatatccagccaatcgacctaatggctcaaacccattagccctaatatcaataatatctacagtatctttaaaacgatttcggttatcattaatacgacgatttacttctccaatttgttgcccatgaatttcagcaatttcttttactaacattgctttcttactttcaccgaatccaccctcgattccagtgaattgataacccgcaatgttttgtttacctaaaatatgtagttcatttgctaccgttaatttatccatgttattttcctcctatttatgcatttggaattacttttgttgtatttgtatcacgatgtactaaatgcatttcattacttaactttttgaagattaaccaattatcagaatttaaattgtgtgactcaatatggatcttttccttcttggttggctttttaccgtttttcattatattcacctcctctgtatctacaacatcaagattaatttcacttaacccgcttaccgtaattcatgattatttttaggtatttttgttctttcgtgaaaatactctattggaactcgtccggctaccgtgatataacctttttcttttagttcattgttaagctgtttaataatttctcgcgctttcgtctctttcacactaaacaaatccatgacatgttcacatctatagacatccatcaaccacacctcattaagcaacaccattagttacgaaacgcaacattcgaggaaaaaaaattcgtataacctcattcggttctatttttaattcattcacaattttatttacttcttctgtatcaaacacagagtaaccgttaatcttatcattcaaggtagttgtacttatctctaatgcctcagccaatttcctataactagaattttcttctcttatttttccttttaaagcttttaattctggatatttacgtcttttgttcatataatcacccctctctcttctaataaattgcagttattgttacgtttcgtaacacatccctagaatacccttaaaaaaaacaactgtcaatacgtttcgtaacatttttgtcaatttcacctctgttgttgttgcgttttgtaacaaacttgtttatactaatcgaaaaagggggttgttacaaaatggaacaaaagcaacttttaaataaagaaatattccctatcagattgaaagaaatcatgcttgagaataaccaaacaatttatactctttcggaaagaattaatctttctgcagccaccgtatcccgatattgtagtggtaaaatggcaccaaaactaactactatagaagttatagcaaaacaatttggtataaaccctgcttggttaatggggtacgatgtagataaacttatcgaaaaaaaacaaccagatcggaaatactatcaaataactgaaaaagacaaaaaagacattgctaaacaattagaaaaaatgttagatggattgggtgatgacaaaaatggttttgccgctttcgatggcgaaccacttgacgaagccacaaagatggtattaaaagattcacttgaacgttcgatgcttttagcacgagaaatagctaagaaaaaattcactcctaagaaatatagaaattaagggggactttgggttgaaggataacataaaacaacacgcactagatctagtaaaagaacacggcacaaacaatccatttaaaatagctaaagaaagaaacatcgaattaatatttgaagacctgcaacatatctacggatattatctttactgtcggcgcgttcaaattattcatatcaattgcactctagaagaattttaccaactctatgtctgtgctcatgaattaggtcatgctgttagacacactgaagaagataccgcttttcttaataagcagacactcttttccacagataaattagaagtagaagcaaatacttttgctgttgaattattgatgcctgatgatgaagtttatcattatctccgttctggatacaccatagaacaaattgcaagtgtttatggagttcctaaacggttcatgaaatataaaacatttaatttttgaacttatttggaaggagttgagaaaggttgcctatctataaagacaaagaaagaggaacgtactatgtaaaaatcgtttaccgcgactacgaaggaaacaagaagcagaaaaaaaaacgtggtttcaaaaaaaagaacgatgctgtcgcctgggaaaaagaattccataaaaaacataatgaaagtagcgatatgagtttcgctagtctagttgaattatacatggaagatatagttcatcgcattagaccaaatactttcgaaaataaaaaatatattattaattcaagaatactaccattcttttcaaaaatcgccataaatgagatcaaacctatgcatatacgtaaatggcaaaacaccctaatttctcaagggtttagccaaacatatctaaaaacaattaataaccaattaaatgcgatactcaatttcgctgtaaaattttacggattatctgccaatccttcaaaagtagtcggctctataggaaaaaagcaagctgattctatgaatttttggacgttagaggaattcaatttattctacgaacaattagaaaaaaaagaaagtaaagttatattctctatacttttttggacaggaattcgttccggggagttattagggttgcaatggaaagacatagacttattaagcaacacaatttccattacaaaatcacttcaaaaggtgaatggcgaaactgtcataaatcctcccaaaacaccaaaaagcaaaagaattattcatatccctttggcactaagtgcattgattgtaaaatataaaaacaaattatacaaacctaaacataatgattttttatttgattgttctaagtactatgtgttatatgaattaagaagaggaataaaaaaagcaaatataaaaaagatacgtgtgcacgatcttagacattcacacgcatctcttctaatcgaattaggatatagcccattattgatatcggaaagattaggccatgaaaaaatcgagacgacactgcaagtttattcacatctgtatccaaacaagcatgatgctgtcgcaaagaagctaaataacttaatggaacaaaaaagttccatatgagtaccacacttctaaaaatatcgtttaaaaacgtggtacttcaacgttcacagctatttattcatttattcccactcaatagttgctggtggcttactcgttacatcatacacgatacggttaacgtgttttacttcgtttacgatacgtacagagattttctctaatacgtcccaagggatacgtgcccagtcagctgtcataccgtcgatagatgttactgcacggatacctactgtgtaatcgtaagtacgctcgtcacccataacacctacgctacgcataccaggaagtgcagtgaagtattgccagatttcacggtctaagcccgctttaataatttcttcacgtaaaatcgcatcagattcacgaacgatttctaatttctcttctgtaatttcacctaatacacgaataccaagacccggtcctgggaatggttgacgccatacgatttcatcaggaattcctagttcagatcctaatacacgtacttcgtctttaaataacgtgtttaaaggctcaattaatttgaactgcatgtcttctggaagtccaccaacgttgtggtgagatttaattgtttgtgcagttgctgtaccactttcaacgatgtctgtgtaaagtgtaccttgtgctaaaaagtccataccttgtaatttagacgcttcatcatcaaatacgtaaatgaattcgttaccgatgattttacgtttttgttctggatcttctacaccttttaacttgttcatgaagcgttcttttgcatccactttaataacgttcatgtggaagccttcgctaaatgttttcataacgccttctgcttcgcctttacgcagtaagccgtggtcaacgaaaatacaagttaattgatcgccgattgctttatgaattaatactgctacaacagaagagtctacaccgccactaagtgcgcatagtacttttttgtctccaacagtttcacgaattttttctaattctacttcgataaagttctccatgttccatccttcagaacaaccacatacgccgaatacgaagtttttaattaaatcgttaccgtgctcagagtgacgtacttctgggtggaattgtacaccgtataagtttttcgcttcattgctcataccagcaattgggcaagactcacttgttgcgtctactacgaatccttcaggtaaaccagttactaagtcaccatggctcatccatacaacttgctcttctggaaggttcgcatataattttgattcgttctctactttaagaacagcctttccgtactcacggtgatttgcacgctctactttaccaccgaagtgttgcgtcataagctgcataccgtaacaaataccgaagattggtaaacctagttcaaagattttttcatcacaatgtaatgcaccttcaccgtatacgctatttggtccaccagagaaaataatcccttttggattcattgctttaatttcttctgcagtaattgtatgtggatgaagttcactgtatacaccgaactcacgaattcgacgtgctattaactgattgtattgacttccaaaatctaaaacgataattgtatcgtgttgtttcttcaaaataatcaccccaacgttagttctcgtatataaatattttcaccaatttggcgaaaagcattaccaatataataaaaaaagccagtcctccgcctctagtctcataacaaagaaaaggcaggggtctggctttataaagaaagatagtctccgctctttataaatataagacacactgccttcatagtcaggttgtttgcggtaacccggtagagactctcaaaccatatcattgaggatatatgaaggatcgttttatattatcttcctagattctaacaatgaaatatcaatatggtcaagagagaaagcgacaaaattctacagaaattcatttccttttctaaaaaacataaaaaaacatccatttctatatagaaatggatgttttttagggcaaacggaattacatcattccgcccatgcatcagatatataaataagaagaaatacgactttttccaaacctgtaaaccctacgtttttttaaatttagaggataaaaaagaaaataaaaagtaaatgattatatatgtttcgtgaccgaaatgtgaccaaaaaataatatatgagagataccctccaaagattttccttcttcatttctcacgatacatttcgctcctaaaatttcacgagcgaaaattacttactagagacgatagttagtcaataaaaaagggtgggcgcaattttgcgctcatcccttcttcatatcattaacggttattttcttttagaaattttacgattttacttttaaaatcatgtagacaataaaagacttgtcgattgatttcctctagatcatcctttgttaaatattcattttcgtgtacttggtcaaacgtttcaacattaaataaagtattttctctaaagtcatctaaagccttatctaattctttttctaatctttcagttgacatattccattccccctatttaattacataagcatatataactaagtcttgtttattaccttcaaagtcatcaattcgagttattccataatcagtacctctaaaacgcactttcatagttggatcaatatcattacgccatctaattttaaaaatagcctctattttgtatttaattgcagccgctccaaaaaattcatctgctgaagcttgtcgataatatgcccaaatgttttcgccgctgggtaacggttcccattccggaattcgctgtcccatttcatcttctgtccatgttgccgttaaaagagttattttcttatcctttttttgagttgtagccataataattctccctcccctataaggctcttaaaaattcatcatgatgctcaaataaaccaacataagcatctaacatacttgctgttccatctattcgcatcttagcagcttgattttttactggtacaatgttgccgttacgatccgtttccacacctgtattagttaaacaccatttaagaataggtgaattattataattaatctttttcgcttgcaaatcggctcccatctgctgcataggaagacttaaagttttggctccttgaatgcatctaaccattttaaagccatgttgctccatttcttctacccaatacttagccgaataactgtcataataaacccacaaaggtgttattccgtaattgttgagcatttccacaaaccatgctgttatatcaccgtaatttatgctatttccgttacaaagacgtaatagcccttgctctagccatttatcatatggaatcttatccatttgaactcgtttttcaaaactatcacgtggcagccaatacatttgatgaataaaccgttttttggtgtctttatccacaaataaaagagttgcacaagataagtcagtagtaacacttaaatccgctccaccgatagcatagcaatttctaaactgctgtatatcaaatgtttcctcgttgtttatatcatcaaatgtaagccatgcgctctttattgtatccctaacattaaagtcctttgtaagtaagccgcttagatcgctagggttattctttgccttttccacttttctttctaaatcatctagttttttaattgatcccaaagctgggtttgcctttttccatgttgtagggtctgtccattcttcttttgaatctaattcgtaaagaatcggcaaaaagctatcatcttcaaatttaccgtctactacattacaagcatacgaatacatatcatcaaatatattctctctgactgtcccagccgttgtaatcataattaacataggttgttgtcgtgctgattgactttgcttcataacttcgtataaattacgatctaaaattgaatgtaattcatcaataataaccatgctgctattaagtccgtctaatgtattactatttttcgccaacggcataagtttagacatagtaagcggaaaatacagatcactttttcgtttcttaatatgcttggataaattaggactttgttgaatcatgctatgagtttcatcaaacaatatacgagcttgatctcgcttactagctatactgtaaacttccgcaccgccttctccatccgcaataagcatataagccgctattcctgctaacatcgttgtttttccattttttcgtgatacatagaataaactttctcgatatcgtcttaatcctgtatccttatccacaaaaccgaacaaagcagctatataagctttttgaaatagttctaactcaatcggcttacctgcccattctcccttactgtgcttgcaaaaacgctctataaattcaataggtttatttgccttgtcttcatcaaagacatatttgcttggttttgctatatcctcaactaatcgtttatattgcctataaactcgcttagaaaccattacttctccagattcaattgcattccaatacccttgtatataattcacgttatcacctcttaataaagtcaattagttcatcttcttttggttttaaatctgttggcggtaataaatcaactaattgcttatacaaaagactgtaacgctgtacagttgtgttataggcttttaacgctggatgttcccttaaaaattcttgcctaccttgtttaaacattgctgtcggtccttcttcatttacttgagtttttaaagcctctaaagtagtttgcataaatacaagctcgttatataaactctgcgctatcggtaaacgctctttaggaatctgccttaatatcgttttaagttttttcatatcactagaaatcgctgtaactttcttagaagtcctcatataatcaccttcattttttgtttttttccatccctccctttatatagaaagtcatggagaggaaaagaaaggctcctcctcggtcctcgagccatgcctttttcttaaattaatggggggtatgttttatttttgaatcaaattccctttgctatcgaatgctaatccatttgcgcatatctcgctgctatgatgttcttggttatggcacgtttggcataatgcctctaaattgtcccaactcaacgttatattgggattattaatattttgtggtgtaatatagcgtttatgatggcatataacggctatatcaccgcatctttcacataaatagtgcttactttgcatgaatccatctttacatttacgccatgttgcactgttataaaaagattttgcataatccttagccatttttcatattcctacctaatacagtcaatgccgctaatagattgtcgattgttcgctttaatcgttcactatcctgatcttgtgggtcataccacaactgtaagagaaactttgttactgtttgtgctaatggatgtactgatgtatcatctgtccatgttcttcctgttgttatctcgagataagacggaatagattctaataacggaatgatgattacgtcattgtcttcaccatctactcttactgtgtcccttgcttcctcgatactaattaacaatttactcactcctttaaataaaagggataccagcgctatactgataccccttcatacttagtttgcttatgcttgctttttagatagtttaataaatgcttctggtacaagtggtttcgtatctgcaattgccattgctcggtaatcaactaatccactcttaaagcttgattctcttgatgtttcaatcattacaccttgcggcatgttgtaacccatgtactggaagtttcctagaataatagtgtcgtcctcgatattgtcatcaataactacttctttacctagaatgtatccaatgctttcattctttggatccgcaataaagataggtcgtccgtttgcatccacaaggctatatacttcgttgtatagtgtagcgttactcatagcccattttgcccctgctgcatatcctcgcttaagcatagccaatgcttttgtaaagtctgtatacttccctgtattttcaaagctatttgtatcattccatgtaacacctgttaccagccctgtaccttgaccacttccagtaccattcactaaagcatctgcaatagcttccattacacaattagtaagttcatcagtcatatatgcttcaaatgcttggatagacattttcttagctgcagcactgatagaaaatactttaatgatctcatagcctttaaatgatacagttgctgttgaaacattttcactttctactggcgccccttctacatgccattgtgccttactagaaggtgttccgattggtacactaatattagttgggatattaaagttacggcaatgtgagattaatccgcccattgtacgtgctttcttgataacctcatttaacgtagttgtaggcaatacagctgcactattcgttgttgtgttaaatgcatccgctcggtgttccgcttcttgaatttccatcgctcggttaaatgttcttgtttcaatatctgtaagcttttgccctagcattgttttatagaatgcactgcggtattctgcgctgccaaaaatattttctgttggtacttgttgcccctggttaaagttcattccagtaatcggattgaattggctacgttgtgccgttccttcgtttgctggtggtgtttgagtttgactttgttgtgcttgtttttctttttctttactgttattcattgcttgttgcaacccttcgatttcaatattgatagatgtaatatctgcatttggatcagtatcaactgtacccttaatttgtgctgctcttgtttccatttctgctaaagaatgattacgataaaaattaaatgcctctgctactgtagtgaatttcatattcttacactctcctcattaataattgattaatttttatttttaatgcttgtctttctgttgatttcaacatttcccatgaactttcaatagctgcccttgcctccacactcgtttgaggatatgcaggaaatggacaaatactaaactcatagactttttcaattttggttattgttcttgtgttcgtctttgcatcaaattggctgccgccttctggtactttaaaagcaaaggacattcccgataggtcttggcgccttactgccgtataaacgctttttccctcttcggtttctggtaattccgccctcattgttaatcctgccgaatctaacgcaaaggacattgttttaggtgttcttgctaaagggattttactcatatcatggttatacagtaagcgaatatccgataaatcagctttatctaatgcgccccttttaataatctcgatatattccccaaatggtgcttttatggtggtaggctgatcgtacacaatcggtctaccatttagaataaggctgctgtcacctgccggctcggctgctcttagttctgctactctcaattctttcattggttattacccccttgttctttaagttgatattgatcggcttttgctgcattaactacatttaatgtttgtagtcgcttgtcaccgtcctcaactggtggtaggtttaaaatttctaatgcttgatttattgtgaataagcctaacggcattaattccttaatgatgtttgtttttgtttcattactagcaaactgcaacctattcgcttcaaaaataatagaattcccaaaggactgctcacgctctgtgaaaagcttgtccgtcaattctaaagagaattgaattgctaaaggctctaatacactttcataaaacgccgcccagtcttcctctgaataagtgctattcacaatggattcactaatacccaaatactcatagattttctttttcaccgcttcaagctgcttatcatcaatagttgtcggctttgtttctagtgggatatagtcatatttattgtctattgctgcgattccaccattgttgccaatggataagtaatcattggtgaaagcttctttttcttcttttagcttctcaggtgataaaacttgattgtatttcaagatacctctaatagttgcattggattttattgcattgctcaacccttcattttgcgtatgtgccaaatctaacgctggcaaaatagctgtattggtatcacctaatagatcattagaattaaagaaacgtcttactataaatacctctgaaaaatgcaatgtgacttgttgaccattcgcaaataagaaacgacaatacatttcacctgttagatcggtgaggtattccacactttgaggtgacaatggatatatagcaactaaattacctttgtcgtccttttctaagtaagcaaaagcattattgtaaagatagtaatgagtaaccaacttataaataagatcatatgccgtcatataagggttcggtcttacttgtaaaatccgatttaaattataatcaccctttttccgacggtctgatgatgtcattacatgcgttccttttagctttgcagcatttctagctatgctatccacagccgccctataaatatcactttcataagcgttaccgctaaaaggtgtaaatattgctggtccaccgctcataacatctgctctttctgtcttctgcagttcttttttacggttaaaaattttattgaaaaaactcgccatttactcaccacctctcatctagccatattttctttctacctgtctctatttcgtattcttgtataagcttcataaggtctaaacgatctaccattaccttttcatcatcacgatgaatttctaattgttccttcaatcgttctaatatttcattcatgaggtttcccccatcctcacaacctctttacccgataatttcatctttttaaggatatagcctgtacgaatataaggactatcttcctcaaaacaatgtgcatctctatgtccttcacctattccatgatgatgaaactttccacagtattgacaccatgtactaagatttccttttttatcacgttcaattgctagtacggttggaatttttttaattgccatttctaccatccttattcatttgattagtaccaagagttctagacagttccagcgcatttcttatttagtacttccgcaaaaacattgtcatatcaacatattctccacttcagttcttaaagttccaaaagtaccacgttttttcaaagtacatatatatgggttttatagaaaaaagttatgaatagttttttctataaaatatatatttattttcttagtactcttggtacttttagtactattcgtattgaatacttgctatatcaatgtttttaggagtaccaaatctataaaatgaactttattttcttagtactcttggtaccccttagttattaggtggattttcttcaaaatcaaaacctaattgttggacaatctctttatttatagttacagcattgatttttcgccctttatggctaattttttgataatcaactgctttcccatctaaaacattaggaacagtaaatccccttttcaaccactcttttctagtccttttttcttctggtcctaagaactcttttaaaaaagatggtgttaaacaaattgaactaaacttataaattgctttgatatttttgggagcatagtcataataaataccatccctattactatccaagtaagttaaaatttcattcaatagttcttttggtttatctattgctttattttcttgggcaatttcgtcaaaaagcttgtccagttgctcaagatctacactaaccttgaaaaattcttttaggagtctacctgcataatggactgttgcataataaagggataatcttgttaaaacctcatttccctgtgctttattcatataaaaatctttaaatttataaaaagatgggagcaactccttcttacgtacttggtactgttttaaaaactctaaaccaattactccataatttgtttctagccccttatataaatcagcgaagaatatataatctactccttcaaatgggctatcatttaaactcacaattcgagcagcagctcccccagctttagatgcatattcatttagacttacttctccagtagttaacatgatatttttccatgtattttctctttgcgaaccactaagagaacccctacctttagacttccctccactgaagttataaacaatggattgaagtaatctttcatccgctttacggctatcatccattaacaaaggaaaactgtttaagaaggatgctttacgttcaatactaactttggttgcgttaaattcatttacaagttcacttgtcccccacacgctggctgcaacttttaatacgcttgtttttccttttgaagttccgctagaaagatccacaatgaaaggatctatttttaaatcatgaagcagtacactagcaaaggatgctaatacaaaaaataatgctctcggatgggctttaatacgattaaatacttcatctatccacccttggactgtcccagctacttggaatgattcaaaaagttgctgctctccttgatcattaggcagtatttcataatctgttgctagtaatggatgggccaaaccacttttcacataacctaaacggtctaccatcagccctctatcaatctcggtaaacgctaaaaccttatcaaagtaatctattaactgctttatgttattatcatttgaaggaaaccctttatctgctaatggcatcatctccctcttagtgaccaatgctccagctggaacaatctcggtgacgaccttccctctatcattccaggttaactcataatataattgttgacgttcaacgttatgtagttctctttttagaatcggaacatgcctagcaaccatgatttcccgttcatcaagttctccattcttgaccttagtttccactctatataaagcattatttttaactttgtaaggagatggaatatttacaggaatgatagaatcctcttgttttttctcattatcgtttgttattccctcatccgcttttccttcattgaccttcttataggccgaattaacaacctttgtaatatccttaataagaaacccttttttgaaggaaacaaagtatttgtgagccaatttaagactggacaatacttcctttttgctcaccttacaaattaataaccttctggctaaatcataaaaatccccatcacgtgaaccgttagtttcatatggataactcataggtgaaggtgttttcgcaccattccatgctttatataagaactgtggaagctcgtccaatttttctagactttgagttacaacatgacgcccttctgtattttcggtcgggaatacgatataacccttttccactgctcgtgtatcttgtgttaaccctaaacgattaacgtaattctgatactgaccttcttttttcgttaaatccgtttcgcctttgaatataaactgccagccattaggagttttaattaaatggtgatgaatgttttctccttcaagtaattctcttagtaactgaccttctttagaatcgtcaatgtcgacaatgaaaataccttttggaacaacacaccctatccagccaccttgaccaagccatccattaatttgatcgttatctaatgaatgcgtgactttccaagaacctactggtgtttttgctttttgatactcttgattgccctttgcatatccagtaagcttaataattttcgctccaggcattatgttgttaattgcttctgtataattcgctgctgtagataacaacttctcacctcccttgtcacaagacgaactcaatgttaaaatataagtagataaataattgttcttgaggatatatgaattcgcagttcatatatctttttttattgtcttttttcaccattctttactacctctttaaataatccatctttaatttcatctactctttcatattctttatttaattcattcatcgtatgattgagcaggcgccaatacactcttagctttctatgaaacccacgaaaacaataaatttcctcacctttgtataccgctgtatccatatcctctactaagtgcgctaaaagaacttctacatctgttaaagtcgcaacgcttactcccagcgatcctaattcaccatcaagttcacttgtgaaattttttaaatttggttgttcattgactgctactaattgatccatatttctaacgctccttatttactattgttaatttcgtataatcttttcttagcttcaaactccatagcttctaaaatctcaggattttttcttgctacagcacatcgttttacaatttcatgcgccttcattaacctcgttgcagacaatactccgttcatatgtattcacctcatttttttaatttgacgttgcaaccgtctttttttcagctatcatttccaacattgcatttatgttcggtccgcaatagaccatctgaccaacaaaatattagtagctttttatattttcatagtttcctatttatccttacgcatccagtcaaggatatcccaacgattcaaacgaataacttgtccccttttaaaataaggtatttcatttgtagctattaatgatcgtacggttggaatacttactttcatatattcagctgcttccttaattgtaaaaatatcatcttgcattttttcttcctgcagttcctcttttaactcacgtaataaacttttcaaatcagaacgagaagttatcaacgtatcatctggtaactcaaattttaaattcactactcaccctcctttttaataagttctttaaagtaaaacattcaatatgatagatatacataacttttgatgatttttactactatttgttgtattttcttgttgtaagacaataatatacctcattgagttgttgtgtcaacggtttttatttatttttacttcatttagttgtaatgtttattatttttccatataatacaagcaaggagggtaaacaacatgcaagaaaacataggtaaggtaattaaagaaattcgaaaggcgaaaggaatttcagcatttgtattaggagaaatgataggagtatctcaacaagcaatttcccaatatgaaaacggcaaaagaaaaatttcctttgaagtactgaataatatagctaaggcacttaatgttcctatggatacttttttatttgtaaatcatgaagcaatagaacagaaaattgctgaaagaggtgtagaggctttagaaaaggagccaagtttatttaacgataaaaccgctaaaggactactaaaactttcagatgacctaaacttctttgaaagcttcttagaaagtctgggttatcataaggagactcttaatactaacggagaatatcacctaaatttaagtccaactagtacaaatcaaataaccgacactgaaacaaatgaacatgttattttaagcggccgtgaatatctcgaattttatgaaagaatatctagggttattgattttgaattcaatgaactaaaaagaaaaaaagattctactaatgctataaatcagttatttggacaagatgaactattataggtggactgcctgcctataatagttaatttattatattgaggtgataaaatggcttcattccaaaagtatgaaacaaaacaaggctataaatggttgttaatcgctgaaattggtattgatccagcaacagggaaaaggaagcagaaaaaagtaaggggttttaaaacaaaaaaagaagcccaattagctgcagcaagcatagagcaagaagtagctaatggaacttacatcaatgaacctgacatattatttaaagattttgtgcaagagtggcttaacatttacagcaaaagcaccaaaataagtagcctacgtgttagacaaaagcagtcggataaattagtcgactttttcgcaaacatcaaaatgaaagatatcacaaaaaagatgtatcaaacagctttaaatgatttacatgataaaggatatgcgtttaatacacttgatggcatccatacagcaggtagaatgatttttaaaaaggctatagagttacaaataataaaattcaaccctacagataacgtaaaactccctagaaaggtggagacagtagaagatatagaaaacgataagaaggctataaaatacctggagaaagaagaattagcgcatttcttacaggtcgcaaaggaaaaaggattagataacgattatgtatttttttctgttttagcatacagtggattgcgtgccggggaattattagctttaaagtggactgatgtagactttgaaaacaatactatcaaaataactaagacgttatataatccagataacaatagccaacgctatcatttacttacaccaaagactaaaggttctatcagaaccattaaaatggatcatggtatcatgaaattgctaaaaagccataaagcaaaacaaaatgagttaaagctatacacacgtcctaaatacgtagatcaaggctttattattacaaaagcaagcggctatcccgaagtaattaaaatggttcagaatagattaaagcgccttataaagttatccaatataacaaaaaatattactcctcattcattcaggcatacacatacatcgttacttattgaggctggtgtaggtattaaagaaatccaacaacgtttagggcatacagacatcgaaactactatgaacatatatgcacacatgacaaaaaatatggaagaaaaagcctctcaaaagttcagcgaactaatgaaaggcttcgtaatttaaatattagtgaccaaagcgtgaccgaaacgtaactattgaggctcaaaagctttatatatcaagctttaaccttaatggttacatcattccgcccataccacccatgcccatgccgcccatgtcaggcattgctggtgcatttggttctggtttgtcagctactacagcttcagttgttaagaacatagctgcaacagatgctgcgttttgaagtgcagaacgagttactttagctggatctacgataccagactcaagcatgttaacccattcgccagtagctgcgttgaaaccaacgcctactttttcgccttttagacgctctacaactacagatccttctagaccagcgttgattgcgatttgacgaactggctcttctagtgcgcgaagtacgatgttgatacctgttgcttcgtcgccttcagctacgatagaagctacttttgtgtatacgttcataagtgaagtaccaccacctgcaacgataccttcttctactgctgcacgagttgagttaagtgcatcttcaatacgaagtttgcgttctttcaactcagtttcagttgctgcacctactttaattaccgctacgccacctgcaagttttgcaagacgctcttgtaatttttcacgatcgaattcagaagttgtttcttctaattgcgcacggatttgaccgatgcgagcttcgatttgttctgtgcttcctacaccttcaactacagttgtgttttcttttgtaacaacaactttaccagcgcgtcctaaagattcaactgtagcagattttaagtcacgacctaattcttcagtgattacttcgccacctgttaagatcgcgatatcttctagcattgctttacgacggtcaccaaatccaggagctttaacagctactacattgaatgtaccacgaagtttgttcactactaatgtagctaacgcttcgccttctacatcttcagcaatgataagaagtggtttaccttgttgtaccacttgctctaatactggtaagatttcttgaatgttagaaatctttttgtcagtgattaagatgtatgggttatcaagaactgcttccattttgtcagaatcagtaatcatgtaaggagatgcatatccacgatcaaattgcataccttctactacgtctaattctgttgtgaagcctttagattcttctaaagtaataacgccgtcgttaccaacgcgctccattgcttcagcgattaattgacctacttcttcgtcagcagcagaaatagcagctacttgtgcgatagaagatttaccttcgattggtttagaaatcgtttttaattcttcaattgcagcagtaacagctttttcgatacctttacgaagacccattgggttcgcaccagctgttacgtttttaagaccttcacgaatcatagcttgcgctaatacagttgcagttgttgttccgtcaccagctacgtcatttgttttgctagcaacttctgctactagtttcgcacccatgttttcgaatgcatcttctaattcgatttcttttgcgattgttacaccgtcatttgtaataagtggtgaaccgaattttttctcaagaacaacgttacgaccttttggtccaagcgttacttttactgcatttgcaagagtgtcgacaccgcgaagcatcgaacgacgtgcttcttcactaaatttaatatcttttgccataataattgacccccttggattttttaagatttatataattaaccgataactgctaaaatgtcactttcacgtaaaatcaagtagtctgtaccttcatatttcacttcagtacctgcatattttgagaagatgataagatcacctgctgctacctctaaagcaacacgctcaccattctcaagcactcgaccagtacctactgcaacaactttaccctcttgtggtttttcttttgcagtatctggtaatacgataccacttgctgttttttcttctgcttgaacaagctcaattacaacgcgatcacctaatggctttagcatgaacaataacctcctcattttgttatgtaaatttcttttattagcactcaagtcatccgagtgctaacacacttataataataaataatctcaatttcttttgcaagtaaaaaaatcataattttttcgcaaatcactatataaactttctatatagaatactgcctttactatatgaatcgttgtttccactgctcgtatgttacaatatgaaaggacaccctaagttgttttcgctacacacacaactttctcctgtcttctattataatttcaaataaggatttacgaaaaaaacataattcaagtgaggtttatatcgtaggtagcatatttacatgttatcctaacttatctcatacactatagttagaaaggatggttaaaccatttgaagaaacaatactggtggattatcgttacatacattttaatgcagttatctggcgttgttggattgccacttctcctaaaaacaggactctatgataatagaggatttaccattgaggaaaaaggacaaatcataacgggacactgggcaattattagcttctttgttgcattatgtatcgtactttggttacttagaacagatattcgtgacaggcatttagatccaaagcgctcttctgctccagctactattggatggattttcatcgggttcttcttagctttcttttcacaaatagttgccggtatgatcgagatgcagctgctaggaattaaacaaggttcagaaaatacaatgaaactaatggagattgcaagaacgaccccttggttccttattgttgtatctataattggacctatcttagaagaaatcgtatttagaaaaattttatttggtgcactttataagaagtttaacttctttatcgcagctatcattagttcgcttgtattcgcagcaattcattttgattttactcatttattggtatacactgctatggggctcgtattcgccttcttatatgtgaagacgaaacggattatcgttccgattgcagctcatgttgcgatgaatacattggtcgctattgggcaaatttttatgagcaatgaacaaattcaagaaatgattaaagaagctgaaaaaatgcaaggctttatcggaggattttttgtatgagaaactcaccattgttcatggctgcactatacttccttcttggatgtatctttacacgcttcgccattacgaacgtgacagatacaatctggaatatgtggacaatactatttgcagttatggcaacaattgattttaatttggcacttcgccttatattaattaaattcacaaagaagaaacaataataaaacgcagaggtcgcttcctctgcgttttattgtggatagtttttcaaaaagtaaactaatgtttgtaactctacagctaagtcaatatgatgaattctaatattctctgatacgtttaatcgcgctggtgtgaaattcaaaataccatgcacgctcgtttcagctaatctatctgctacagcttgtgctactgtagccggtactgttaatattgccacttgtatatcatttgataatctctcttctaattcatctaaatgatatacaggaatgcccccgatttctgttccaactttctcttcactaacatcaaatgccatttcaatttttgtattattgtttttcgtgaaattataatgtaagaaagcggtccctaaattacctactccaataagtgctacacgtgttatatcatcttgatcaagtgtttcgcggaaaaatgataatagataatttacgttatatccatatccctttttccctaacgctccaaaatacgaaaaatctcttcgtattgttgcggaatctacttttactgcctcactcaattcggccgatgaaacacgctgcttaccagaaagagataagttttggataaatcgatagtatagaggcaatcttttagcagtggcttgtggaatcttttgctgatccatatgacctctcctctcttcctatctttattcatatactttaatcaaatacagaagtttagcactcattaaattccttgtataataaagagaagaagtattctctctttattttaaactatacactatttttagtatgattgagaaatataaacatggcaaagttaagaaattatttgaggtgaaaacattgattttattacaagtaaacgcgctttcgaaattatacggtgcagaaacgattcttgcaaacataaaattggaagtacaaacaaaagatcgtatcgcattagttggaaggaatggagcaggcaaatctacattattaaaaattatcgctggtgaattatctcatgatggtggcgaaattataaaaccgaaagatgtctcaatcggatatttagctcaaaatactggactagaaacgtctttaacaatttgggatgaaatgctaaccgtctttacccacttacagcaaatggagacaaaacttcgaaggcttgagcaagaaatgggaaaagaagaaaacttttcaaacgaagctacatatgaaagattgttagctgattatgaccaattgcaactcaattataaagatcaaggtggatatcaatatgaagcggatattcgctccattttaagcggccttggcttcccagttgaaacgcaccagacgacgatctctactttaagcggcgggcaaaaaacaagattagctctcgggaaattattattaacaaaaccagacttacttattttggatgagcctacaaaccatttagacatcgaaacattaacgtggcttgagcaatatttacaaggttatcctggcgcaatattaatcgtttcacatgaccgttatttcttagacaaactcgttacacaagtatatgaaatttcgaataaagaaagcagacgatttgttggtaactacagtaaatatttagacttaaaatcagcattatatgagcaagaaatgaaacgttacgaaaaacaacaagatgaaatcgcaaaacttgaggacttcgttcaaaagaatatagctcgcgcttctacaacgaaacgtgctcaaagtcgtcgtaaacaactagacagaatggaattattaacgagaccattaggggattctaagtcagcatcattccacttcgatattgaaaagcaaagtggaaatgatgttttacaagtaaatgatgcaaccatcggctatgatgagaaccctataattgaacatgtaactatgcgcttaactcgcggagatagtgttgctttagttggtccaaacggaattgggaaatccacattgttaaagtctattgtgaataagttaccactattaaatggtgatgtttctttcggatcaaatgtatctgttggttattatgatcaagaacaagcaaacttaacatcttctaaacgggttttaaatgaactatgggatgaatatccactgcaacctgaaaaagaaatccgtactatactcgggaattttttattcacaggagatgatgtactgaaaccagtatcttcccttagtggtggacaaaaagctcgattagctcttgcaaaacttatgatgcaaaaatcaaatttattaattctagatgaacctacgaaccaccttgatttaaacagtaaagaaattttggagaatgctttaattgattatccagggactcttctattcgtctcacatgaccgctactttattaaccgtgtaacaacgactgtggttgagttatcaacagaaggtgcacaggaatatttaggggattacgattactacgttgaaaagaaaaatgaaatgattgaacgtgcagaacttgaacagcaagaaagtgacattcctgttcaaaaggtggttgcacaagagaaattaaattatttagaagaaaaagagcgtaaaaaactagagcgtcaacgcactagaaaaattgaagagctagaacaaagtatattagaattagaagaagaaattgctacgttagaagatcaactttgcttaccagaaatatatgcagattatgaaaaagctagtgaaattacaactaaaaagcaaacgctacaagaacaacttgaaacttgtatggcagaatgggaagagctgcatgtataagcatatttaaataagaaagatgtctcataagtcaggatttttgactatgcgacatctttttttcttttaatacagaaacaattttttgagtatatcaatcgtaacttagaatataccaacgatttttcaaatatatctattgtaaccctatatatattaacagttcgacacgaaatatcgatttaacgacaaagattgacaatattagcatcttctataatagggggatgtttcaaaatgtttttcggggatatcttcttactttttatttcccgaaaaagaacaaacacaaaggtctgacatcatcctatttatccacaagtttatacacatatccacctttataaaataaaccttaaaataacttttccacattatccacaattaataaaaaagttatcaacattttatatacacaataaaacccacattatcaacagacaatatgggttttatccacaacctgtggttaattatgtgtataactatgcttcaatatctaatcctggatttgcatttaaggctaatgttgcacgcttaccttgttcataagcaattgtccctgccgctgcaatcatcgctgcattatctgtgcataaagatagcggcggaataattaattcaatgttttctttttgtgcaaattcctcttctaatcgcgcacgaagtcctttattagcagctactccaccagcaagaagtaattgctttacattataagcttctgctgcacgagctgctttcgttacaagtacatctattacactttcttggaaacttgccgctaaatcttctggcgcaatttctataccgcgttgttttgcgttatgcacagtgttgataactgctgatttcaatccactaaagctaaaatcatatgaatccggttctagccatgcacgaggcaaatcaattgtcggttctccttcatgtgcaaggcgatcaatatgaggaccacctggatatggcatagataacgtacgagctactttatcatatgcttctccagctgcatcgtctcgtgtttcaccaattacttcgaatgaaccatgttctttcatataaacaagttccgtatgcccaccagatacaacaagtgataataacgggaattgaacttcttttactaaacggttcgcataaatatgaccagcaatatgatgaacaccgactaacggaatatcatgtgcaaacgctactgccttcgctgcatttactccaattagaagtgctcctactaaaccaggaccttctgttacagcaattgcatcaatatcatcaaatgtgatgtttgcttcctttaaagcttcttctaacacaactgtaatttcttctacatgatgacgggatgcaatctctggtacaacgccgccaaaacgtttatgactttcaatttgtgatgcaacgacattcgcaataatttccgttccatttttaacaactgctactgctgtttcatcacaacttgtttcaataccaagtataatcgtatttttttccattatatattcacccacattacgagaccatcttcctgattgtctgcatagtatcgtttacgaatcccaccattttgaaatccgtattttctgtataactgctttgctacttcatttgatacacgtacttcaagtgtcattgtttttacccctagttctttcgcttcagaaataactgctttcaatagggcatctcctaacttttgacctcggtattctggcaaaatagctatatttgttatatgtgattcatcaataattatccacaatccacaatacccgactacacgaccatctttttctaacacaatataatgtgcatgttcattcatcgttaattcacggtgaaaggcatctgcagtccaaggagttgaaaaagacgcttcttcaatagctacaatttgagcaatatcatcaagctccatctttctaaatatcatatccatcttctgcaagctcctacttgttttgactttctaaccactttgtttcagcttcagctaaacgaagatagcttggaacaaacgtatgcacatcttgttcttctttttgtaatcctaagaatgctagctcacttggtcttgggttatttttagtaaatggagcgaatacagcttgatcacctaaatgttctataattgtttctttatgcaatttaacatcgttaccgataaataaaacaggctgtcctttatcttttaacatttgcaaccagtccacaataagaataattcggtcttcttctattgaagttaactgctctccttcatatgtatataacccagtataaatttgcccacgtcttccatcaaataaaggacaaattaacccgctaaagttagcaccgtttgcagctactacctctaaacttgatacacctacaattggtatttgaagtgaccaagctaatgttttcgccgctgtcacgcctatgcgaacacctgtataggatccaggtccagcagctacaacgattttagttaattccttcggttttacgccacactcttttaacagtttctctacagctggcataagacgtacagaatggttttttgttaaatttgtaatgatttccccaattacgtttccttcctcaataagggatacacccattacgtaatttgaagtatcaattgctagtactttcatcttgtaatagctcctcacataatctaatatagcgatctccaattggctcgagtataatttttcttgtgtcatctccagcatggaataaactaatttgtaacttttcatttggtaaatatgcctctattaaatgagcccattctactaccgtaattcctttaccgtagaaatattcatcaaagcctaagtcctcttcactttctgctaagcgatacacgtccatatgatatagcggtaatcttcctttatattctttaatgatattaaaggtaggactatttacaactcttttcactccaagaccttttgctagtccctttgtaaaagtcgtcttaccagctccaagatctccttctaaaataattacgtcttgtgcctctacgagcttacctagtttttctgataacctttgtgtttcctcagaagattttgttgttacttcatatttactcacagacttcacctactttactcacaatgttctctgctctttattatacaggttttgaatatataaaaaagtccttaggagttgtcctaaggatagtttgactgtctttattagttttttgttaaaacaaataaaaaaatacgaaacaacttgtttcgttcttttctttatatgaaatggcggtcccgaccggggtcgaaccggcgatctcctgcgtgacaggcaggcatgttaaccactacaccacgggaccatttggttgcggggacaggatttgaacctgcgaccttcgggttatgagcccgacgagctaccgtgctgctccaccccgcgacaatataaatagcttggcgacgtcctactctcacagggacaaggtcccaactaccatcggcgctagagagcttaacttccgtgttcggtatgggaacgggtgtgacctctctgccatcatcaccaaactatgaaggcatattccttcaaaactagataacattgctacatattatatggttaagtcctcgatctattagtattcgtcagctccacatgtcacatttcaattaatggaaaaccgtagagtttctatccttaagttgatgggcatggggtgactccattctttgaagtaaaatttcttcagcttgttttattttatttaaatcctttttggataattggctccttttatttgcatcacgatcattcagtaatactttcccaaagtatatagaaagcaattcgagcgctttactttctatttcgagttgattaatacgatccttttggggattctctaacattctcttaataatattagatgttagggcatcaatgggggtttgaaactttttaaaagattgatttcctattatagtatgaaaatcatgacttttttcaatagcacaatttagcatgaaatgattaaacaactgtacaggaattccaattgctaatgaatatagtggagtttctttttcatattcaaatagaacttcaaagtcattcataaagtataaatagctattcccagccattaatttatttgtagagtaaccaacttgtacttccccggatccttgtaaacaaaaattaagttccaccattgctgcatccgatgcaaattgaatgcgatggtttttatggaactggtaatttgatagcactatttccattccagaaaacgagctccaccttcgcacttcacccatacctattgtttttggcacatacatatatctttcttctacaacttgtaacccatgaaaatatttactaaaaatatcatgaaaactgttagtcttcatgaaatccacactccttttatatacaaattacaatcaattgataatcattttcaattataacaaatatctttatacaataaatagcttttacctttatatctcgttatgataaaagaaaaagaaagcgagccgacaatgaataaaaaaattgcaattattactggggcttcaagtggattcggcctattagcaacgcttgaacttgcgaaaaaagactatttagtcattgctacaatgcgaaacctagaaaaacaaggaaccttactatctcaagttactgaactcaacttacagcaaaatataaaagttcaacaattagatgtaacagatcaaaattctatacataactttcaattatatataaaagcaataaacagagtagacctacttattaataacgcaggatatgcaaatgggggctttgtagaagaaattccagtagaggaataccgcaaacaatttgaaacgaacctatttggggctatatcaattactcagcttgtcttaccgtatatgagaaaacaaagaagtggaaaaatcattaatattagcagcattagcggccaagttggattccctggtttatctccttatgtatcttcaaaatatgcattagaaggctggagtgaatcacttcgcttagaagtaaaacctttcggaatagatgttgctttaattgaaccaggttcttataacacaaacatatgggaggttgggaaacaactcgctgaaaaccaatctgatacaacatctccttacaaagagtatatggataaaatacaaaaacatattaatagcggcagtgatacatttggtaatccgatagatgttgctaataaaattgcagaaattgctgaatctaagcgtacaaatttacgatatccaatcggtaaaggtgtgaaatttatgatctttgcgaagaagattcttccttggagattgtgggaacaccttgttttgagaagctttaagaaaatgtaataaactttttgaaaactattttgaaagggatgctaattaaatgttaggtttaccgtatgggaaagtgtttttagtgccgtggactgaagaatgggaaattgagtttatgaaagagaaacaactcattgaggaacaaattggcgaacatattttagcaatacaccatattggtagtacttctattccatatttaagtgcaaagccaattattgatatagcaattgaattagaaaattatacggacggtatacattgtattaaaaagttagaactactaaactataaatatagaaaagaagtattacccgaaagatactattttaataaaggtgaaccaagaactcatcaaattcatatgtatgaacaagggaatacatatttaatagaacaattacaatttcgtgattacttaatagacaataaaactgcacgcatgcagtatgaacagttaaagattcaactttcacaagctaatcctactgataaacataagtatgcagaggataaaactaatttcattacatctatattaactaaaataaatgcttaaataaacaagaaaccatttagtagtaaatggtttcttgtttattagttatttcattatttgtactatcaaatttttattatacagcaggtggaaagaagtaaaatagtatcgaagtcataaaaataaacgtgaataccccaattaccgaaaatatatattctttcgactctctatcatacttccattccatcaatgctcttaagattaacgtcccacctaaataagtaaaaatgacataagcaatattaatactttcaaatttaaagataaacataaagctagttattaaataaataaaaagtagtcctatttccaattttttatgtaaactatttacatgttttttatatccccaaaaaccacccttgggcatattcaatttttttcttaaaaacttatcgagaaaatagacagctatacaaaaaacaatagttataatccaaaaagtagaacctcccattttcccccctcctattatttcatttaattacttgaaataaattggactatattacggttatccccttctaaataacttatgatgccttcaggatatgtcggcttctcctgtaattcctctagacttttccaaattaatataatatcctcatgctctttatgccttatttcatttgtaatgattttttcaacagtcccccaatgtatcaatgtacaatgatgacctttttcgttgtcccactcaaaaatgtgttcatttacaattgctaactcttgaacatcaactttcaaatcgtattcttctattaactctcgaattattgcttcttttgacgtttcaccaaattcaatagagccacctggaaaacgataaaatgattcattttcattgcattgtacaagtactttagaatgatcttcatttaaaatcattgcttcagcacgtaatttaggatttttcattttgtctccccattcattccacatatgattaaatccaataggtataaaagaaaaaattaagaataattcctgttattactaatagcggaaccgttcctaaagaaatgacatattccctcgattctttatcaaatttccactccataaatgattgaaagcagtataaagttattaaaaataaaatgggtaaattactaatataaacgggatttaaagtagcacatatcatcgtaaaaattatataagaaataataagagccctagtgccccatttatgaaagttgtttacatatttactattccagtctgtttgtttcggtatatttagttttttcctcactactttttcaaaaacaactaaggatataatccatactattaataaaattcctttaacccaaaacagtgatgtttcctcctttaccttttctccggctgatcactcggatacgtagcattccttttattttctacgtcccaactaataattgtcgcactatcacgtcccaactgatgatgcacgtgttctaaaacattgtgaatattttctttaagtgttttatcatttctgtgcatagcaatatgcaaatttaaaggtatttcatatcggcgctccccgcattctaatactccatctgtcaccattacaattcggttctttccagtacgtaattcacgaatacctgatgaatagcaaggaacaggtaaatcaaatgtgtttacatttccaatccattcgtaaaaatgacgttgatttaatgcatattgtcctaacttatgtaactcttcatgaaatacatacactaaacaatcaccgatagaaagccaccatatataattttctttccttacacatagtaagcaagctgtttcacctttaatttttttgcacttttccttaaatgaagatgactgaaaaattgtaagtatatgattttcaacagactgaaacactgtattaattggttcattcaaaattacttttatattttcatattctttttcgattgtatttactactaactcaacactttccgcactattatgtccatctagaatagctgcaaattcccattcaccatttgaccaaactaatgcaccatcttcattctttttcgctccagcacttatattcccaccatatttaccaagtacaatatcaccatattgtttaactgaaatttctcctaaacacatttctatatttccaacccatgaatattgtgtattattttttgtatgcatactcatttaccatatactttcgtattctttcacatagtttttttattttctcttcgtcaccatatggtgcgccagtccatttcgctatctcggttggtgaccaaaactcttttggtgtattcggataacgcggaataatgtgcatatgcatatgtggtacaccatttcctgaaacaaaagtgtaaatatgctctgcaccttcgctttcttttaacgctttacttactctacttgttataagtccgaacgctttcgcttcttcatctgttagttcagcaaggccaggtacatgtctttttatatctatcattacataacccaggtatgtttcttcactatcccagtggacatgtccaacgtaaacgagttcatcttcgtaaatagctccacctggaactataatatttcctatatgttttttgcaaatgaaacagttttgttctatttgattgtttgttgacatatccatcaccttccttttcatatataatatcacaaaaaaaggaaaaacaggtttagtattccgaattttcattcttttgatacaacaatttttgaaatgaatttacatctcattatttcttcaaaaacgcaatcccaattataatcccaatcacaattccgattactaaattatttgtaaagtgcccttgaaatacaccaattacaactcctataccgacacctattgccaaagcatcatttctttttttatttttagccaaaattacatctcctcccatcatttctccctaaataacatacatttacttgaatgtattaatataaggactatctcgcttaaatatttccaaaaaatgtactgtaactttacatataatattttccattttctgtacatactccttttatattggaaaattttcaagtaactattaattatacataggcatttactataagaaagcttcgtaatttattgaaggaggaacgattcaaatgtatcctcattggaatccaaatataaatcaacagtatgtttattcccctcatcccgcaaggaatacattgcatcatgattcacaatatatgatgcagcgtattgcaagtcttgaaaatcaattaactaaattaatctcattaatcgaggaaaataatcaattaattaaatcaatggaacaacaaaaaaaccaagtttgtgcaccagctggaggttctgttatcgttcgtatgtgatctggatgcaataaaaaacacactttgtattataaaagtgtgttttttattcattattttcttttcgtatggaacccttgtgtaattcgatctaatataattgcgattactacgatagctaatccagcttcaaatcccattccgatattaacttgtgttacagagcgatatacatcaactccaagtcctggagctcctacaagtgatgctgttacaaccatcgataacgaaagcataatgctttggttcacaccagccataatcgttccggttgcaagtggtaattgtactttaaatagtttttgtgatgctgtggatccaaatgcattcgctgcttcaattaaatcttctggaacttgtctaattcctaagtcagtaaaacgaattgtcggtggcattgcaaagattactgatgcaataattccaggtactacacctactccgaaaaatgtaatcgctggaataaggtatacgaatgcaggcattgtttgcataaaatctaatgttggttttaaaaattttgagaaacgttcattttgagatgctaatataccaattggaattccgacaataattgaaataataacagacgtaagtacgagtgctaatgtttgcattgtttgtgcccagtagttaatattcaaaataaataataatccaataagcgtaaaaatgactaaagataatttcctcgttgtgtaccaaatgaggaaacataagataataatcatcaatatggcgggtattattgttaaaaaattagtgagtaaatcaacaaatccgccaataatataagagaatcctcggaataagccttcaaagtgctcatataaacttgcaacaaatgagtcgacccattcccctaatggaatccgcggtatactattcatcgtctttcacctcttcctcaatgtttcctgcaagagcttgaatgacactttcacgtttaataattcctcttagccttttcttctcatcgattactggtaacggatatttcatctctgccatttttgcatatgtctcttccagtaaagtatccaaatacacatgcggaatatcattaagtaataaatcagcaatcggccactgtttttgtactgctttactcgcatcatccgcagttaatatacctaaaaactcatactttttgtttacaacatatacagttgaaacacctgcattcctcataatttgaagggctacacgaggtccacgatcaattaataaagtttctggtcgttttaaaatagactccgccgtaattacttttcctaaattcacatccgcaacaaacttttctacaaattcattagcggggctcatcataatttcttctggtgttccaatttggacgatttctccatctttcattaatgcgatacgatctccaattcgaagcgcttcatctaaatcatgcgtaataaatataatcgttttttccattttatcttgtaactctaacaattcatcttgcatttcttttcgaataagtggatctaatgcactgaatgactcgtccattagtaatacatctggattattcgttagtgcccttgcgattccaacgcgctgttgcataccaccactaagttgacttgggtaattatctttatgatgatcgagtcctactaactgtagcgattctaacgcttttttctctcgctcttcaaccggaactccttgtatttctaaaccatatgcaacattttgtataactgtacgatgcggaaatagagcgaatttctgaaataccatactcattttcgttcttcttactctccgtaactcttcttttcccatcgttgcgatgtcttcaccatctatgtatatatgacctgcagttggtttaatcaattgatttaacatacgaactagcgtagatttcccgctaccagacaaacccataataacgaaaatctctccagagtaaacttcaaacgttgcttttttcaccccaacgttcattcctgtctcttttaaaatttccgatttactttttccttcttttaataaggaaagggccctttgcggatgtttcccgaatacttttgttacgttttcaacacgcacctttgtattatccatgtcactactccttttctacccatctattcacatagtgttgcgattttacaaagaaatattacataaaaatgacattcataagatttctttaaaattctcgtttccgttcataataagaatgcttacttatacatttattttataaggcaaacgttacttaggaggttttcgatgcgaaagaaaatttggtttatatgccttgcattatttattactatgattttcacttcatgtaatgcaacaaatgcaaattcgaaaggaaaaattaaacttggtgtaacaagttggaaagaaaatattgcaaccgcaaacatgtggaaagttttattagaagaaaaaggctacaaagttgagctcatgtatttagaaaaagccgcaatttggactggtgtcgctcgtggtgatgttgatgcgaatttagaagtatggctaccagttacagataaaccgctaaacgatcgttataaagatgatattgtcttaaaatcaaaatggtacgaaggtactggactaggtttagtcgtcccttcttatatgaaaaacataaacagtatcgaagatttaaatgctcataaagatgaactagagaataaaattgtcggtatcgaacccggtagtagtcttatgaatttaacgaataaagcaatgaaagaatatgatataaaactaaaacttgtccaatcctctgaagctgcgatgatgagtgaactaaagaaagcatatacgaaaaagaaaccaatcgctgttacgctttggaatccgcattggggcttttcagaatttgacttaaaatatttaaaagaccctaagaaagtatatggtgaaaaagatgacatttattactctgttcgtaaaggtttcgaaaaagaccatccggatatcataaaatactttgacaaatggaagatgaacgatgaacagcttggtacattaatggtcgagttaaataaaacgaaagatcccgaagaagcggcgcgaaaatggattaagaagaatcaagcgctagttaatgaatggataaaagattaataaaaataggctagagggttaggatatcctctagcctgttttcaacttattttttcgtaacaacgtcatctacaatcccatatgccttcgcttcttctgcagtcataaaataatctctttctgtatcatgtgctactctttcaatcggttgccccgttttttctgcaatcattttattaatatcatgctttaactttaatattcttttcgcagttatttcaatttctgttgcttgcccttgtgcaccaccaagcggctgatgaatcataatttcactgttagggagagcaaaccgttttccttttgctcctgataataataacaatgcaccgaatgatgccgcaaagcccatgcatagcgtttgcacatctggtttaattaaattcatcgtatctaatattgcaaaacctgctgtcgttgaaccgccagggctattgatgtataagaatatatctttttctgcatcttctgcttctaaaaataataattgcgctacgacactactcgctacttgatcattaatttctgagccgataataataatgcggtcttttaataaccttgaatatatatcataggaacgttctcctaattttgtttgttctactacatatggaattgcattcattttaaatccctccaatacttgttatgctgcgtaaagcatataactgtaggaagaagggtttttcacattaaataataagactggctgtttagatggtaatttagtaaaatctattgtcggaagaagcttcgttaataattctggtctttcctcacgaatagatgttacaacaacttcaatatcctctgtgaattcgactatctcaatcccttcttcacttacagttttcagcctatttctactccgaaataaagaagctttcactgcaccttctgatacagaacacactttagcaatatcagcgatactatattgaaaaacatcttttaataataaaattgcggattgctgtacatttaatgaagacaatactttccctaccatttcatgcaaatctgcaatgttctcatgtggttcttcaaaagtgatttgtcctcttattttttcatgaacagacttagacttcatctgatctaaccaacgatttcttgctattttatagacgagtgtcatacaaatatctttatttctatattttcgaagcactttacacactgtttcttgggcgagatcttccccatcccatttgtttttcgttaaaaaagtacagtatctttttaactctccatattgttcaattaaaaagtttatatttgaatgattcatatcgatatgattctttaaaacatgagttacttttgtgcacaaaataaccactccttttcagcgcttacttaataaacgattcaacattaaaaaaagttacggggatataaaaaaataatgtttatgttcaataattcgcggtcataaatatgttatgtacaattttacgtgaggaggaacaaatttgccaaaattaacaattgaaggtgcgggaacttttgatgtgaaagaaggaacaaagttagtattagcaattgaagatagcggtgtcaacattcttcatcgttgcggcgggaatgcacgttgtacaacttgtagagtagaaatactagcaggtgatttctgtgaagcgagtgcgaatgagaaacatgcaatgacggaaaaaggaattgaagatcatttacgattatcttgtcaaatgcgtgtacataaagatatagtcgttcgtccggtacttacagttgaaaattcaggtcttgatgctgggccacgcccggcggagtaaagtgatgaatttaaaacagctcgctggcgaatatgctgctaactttgtaaatgatggcatgaaaattgggcttggtacaggttctactgtatattggacaatacaaaaattaggtgaacgtgtaaaagaaggattatcatttcaagctgtaccaacatcaaaggaaactgaagcattagcacagcaactaaatatccccctaatttcgttaaacgacgtacaaagccttgatcttacaattgatggagcggatgaaattgattcaaatttacaacttataaaaggcggtggtggtgcattacttcgtgaaaaaatcgttgcctcttcctctaaagaactaattatcattgctgatgaatcgaaatttgtaacacatttaggtaattttccattacctgttgaaatcatccctttttcatggaaacaaaccgaaaataaaattcagtctttagggtgtcaaacaacgttacgtttgaaaaatgatgaaacttatataaccgataacaataacctgattatcgattgtatattccctaatcatatttctaatcctgcccatttacacacccaattaaaaatgattactggtgtagttgaaacagggttgtttataagtatgacgagtacagcaattattggtactaaaaatgggataaagaaattgtaataaaagctaactttttaaagttggctttttagtatgttcttcttctcttaatagtgctttattatgatatactaggaaaacgcaaactgattacactagaaaggactgaacattttgcaatccaaacttataacagaacttgctgatttagaaactgcctttcatattcgaaaagaagtatttgtaaaagaacaaggtgtccctcttgcagatgaattcgatacattcgatgaaatcggagagcaatgtaaacatattttagtttattatcatgaacttcctgtaggcacaggtcgtatacgatttgttgatggtgtcggaaaattagaacgtatttgtattttaaaagattatcgtacatacggattaggtaaagtcatcattcaaacgttagaagaacttgctcgtaacgaacaagttacgaaagtgaaactacacggtcaaacacaagctgaaggattttataaaaaattagactatgaaacttcttctgatatatttatggaagatggcattccgcacatacttatgacgaaaatgttatcataataaaaagggtagtatatgaatcttatgtattcatacactacccttttttattaatagaaaagtgaattctcaagattaccttttgcatcaaagcccatcatctcttagttcatacctaagtaaagcttacactgttttccataatgataatgcatatatccagtttggatcaccatttccttgataactctggactgcttcatatacttttccttcgtgtagaactctatctccctttttatatgctttttttgcatcccacgcttcatatgaagcgctttcggtttttgtagtaattgtgaatatatcactctgtacggattcatttccagctacatcaacagctttcactacatatttataagtagtattagcgagcagatttttatccaaataagaagttgtattggatgttgcaatctttttcattgatccttctgtttctctataaatatcataatggtctacaccaatattatcgtcagatggactccacattaaatccacacttgacgctgtcgttcccatactatgtaatccttttggttgtgttggtgcttctgtatcaggagtctcaactgtcgtttttactgtaagcgctgtactttctgtcgatacattgccagctgcgtcaattgcttttacagtataagagtattctgtacttggttgtaacttcttatcaataaaatgagtccctggtactgtatcaatcatctctccgttacggaagatttgatatccttttacccctacattatccgtagaagcgttccatgttagttctacactattcgctgttactttttgcgtctgaagtccatttggaatacttggtgcttctatgtctggtttcacatcattaataagattaacatcaattacattatagaatgcatttgctgtatcagctacatcccatactgctaaaatcacatgatatccactacgatcagtaggtacattgattttatgagttaaattatttgaagctgcagaaccatcatgttgtacagttccaattggttcgaaatctgctcttgttagcgctttatttggattccatccttttttagtaatatagtaatgccacttactcgttaagtgaggcgcagtatacttccaagtaaatgtattttccccaccagtgattgtatttttaaaccaacgattttctgtttgttgatctaaaataccaccaaattttccgcctgctgaagcaatttgtccatctactggaccaccttgtgggaacccttttggagcttctaaactttgtggttcatacataacacttccacagtttacatttagcgcaccataagttggactacataaagcggatcggctaccgggcttttcaacaaaaccgtgcgcataagcattttgaggaataagtgtcgtactaataattccagctgttaatgctacaactcctaaactttttttgttcattttcatattttgtagttgttttaaaaatcgattattcatgttcatgtccccttcttgttatactttgtagtggaatgtgggctttgatgtaaaagaataacaagagacaaacttgtaccgatgtatgtgttaattatgcatacaccgcagtgaaaatatattttttccttgtgaaatatttcactttatgaatatatcatgacatagaactcgcctaagcatgtgcagaagttgtgcagaaacagtgaaattattactaacatataaaaccacatcctgaaatcataaagtaaaactttaattagttggggttttacggtcggttaatacgggataaaataaaagtgtgcagcagaaattgtagacttagttctcaaaattcacatttagtattttcattttttccatttaaacaattcttctcttcttacaacagaaaagtgtctatatcatttaatatagacacttttttcatgtataactttatatttattactgacctacaaatgtaaagatttcatcaacagcttctttatatccacccgatgttcggaatgattccttcaaattcaaagcagcctctttatatgaagggttatttaaaattaactccacactttcacgcaatttctccacggttaattcattcatatgtaattgaactcctgctccaagactctccacttgctttgcaattgctggctgatctgcactttgcggtattacaacgagcggaaccccgttatataatccttcatgcgtactgttcatcccgccgtgtgtaataaatagtttcgtataagtaagcagttcggtttgaggcacatagtttttcacaatgaagtttttagggatttcgcctagatcacttatttttgttttattaccaatagacataacaattgtatgctcactattctcaaaggccttcatacacagtttataaaagtcaatcgcttcattaaaaacagtacctaatgaaatataaatcggacttttttcttcaattgaagtaaaatcaacgtctctgtttttcatttgtgcagagatagatggtcctacaaatttatatgtttcatcaaacgtatcaccaaaaggctgaaactccttaattgtatacacaatagtaagaggtgcaggattacagaaaacttcatacgatgattttatttcaacaccatatttttcagcaattcccttcgttaagttttgaaaatcattctgtattttatcatgaatttctactgggatattttttgacagatgacctaacatttgctcaaaggatttttcatcctgcgcaaaagatgtgcatgaatttatggctggaagtttaagaatttgagcaattaaatggccacaaccaaacatagaatcatgaatcatgtaatcaaaatgttcaccttcaatttgttctagaacgctagatattacaatatccgctgtatgtagaaggccgtttattctttcctgtaaataatttctgcctccagatagaaacgcttttataaatttttgatcatcaatcgttcgtacagtagcacctgtcttctcaatccgatccctgaaagcttctattgaaaaataaacgacctcttcaccacgagaaatcaattcttctacaacttgtaaagttggatttatatgtccttctgatccagcgttaataaataaaacacgcgccataataaacactccttacgttaaatcgtttctatgttggcaagagtacggattttctccatactcttttcttagttgttcgtagcatgttcctactaaattgacctagcgagtctaaaaccgagatcatctatatgaaatgtaggatggcttcgacgacgacaagtagcgccgcaccctctcgctgtttcagcccaactaccaccacgaaaaatgcgatatgatccgtacactgtttcatcatacaaatcataacaccattcccaaacgttccctagcatatcataaagtccccatgcattcggttctttttggccaacgtcatgaatctctccatttgaattttcattataccacgctatatcatgaagtttcccgtatgtatatccggttgtacttgctttacatgcatattgccactctgcctcacatggtaatcggtagccatttgaatctaaattacatttcacaatttgaccaccatcactaatagaataatattcttttaatcccgctttttttgaaagtacattacaaaacgcaatggcatcgttccatgaaatattgacaactggtttatgatttttatcaaaattatttaatggactatttgtaatagcatcatatagttccattgttacagcatacttcgcaagaagaaatggttgaatttgcactagccattctttttttattcgatcatctcttaatactacctctccagctggaatatttaccattaatgaatcgattgtttgaattaaatcattagtcattttctattcctccaaacgttcattttatatgaatttatagtcatatactcattacaaaatacaattttcaaaaagcgttaaatttttcataataaaaaacgattagtttaattaaactaatcggtaagatccaaaaagaattgttgtgtcacattgtattattatatgtgctctaaaaatttccgaacctcatttggagattttaaaacaataacctttttctcttcggacaattgctctaacccttttaaaattgtaggtcgtttagcattaggatatttccatatccatttaaaaaattgcaaatcaaatctttcttcacatcccgcgcccatatctggtcttgttttattccggtattttacaattcttttaaacgcacgataaatacaaattgttctatgaatatcaaggaagataattgtatcagctgcattcagtctgatatccatcgtcccgccataattcccatcaataatccacttctcatctttaattaagttattttgaactgctatttgttcttctctcggaacaccttcccaattcggtttccaaaataatgcatcaagatgatgcaccttaatatttaatttatttcctaactgccttgctaatgtagattttcctgaaccaccagaaccaattaatattatttttttcatacctttacgatacattctataacttcttcaatagcttccttattagcaaaaatccagaagaacatttcttcatttaactttaataaatctggtaactggacaaaataagcaataaagataatttgaattgaaagcataacataccaaatagcttttagttcttctttcgttaaatcattttgtttataataaccttcaaagactttgcaaacgatatgtaaccatttccctcttaatctttcattactaaatagctcgcttaatacacttgtacagcaataacatagatcgaatatttttacattattttctaaaatctcaaaatctataaacccttccagtttatcatctttaaagattacatttgatagatgcatatcacgatgaataatttgtctcggtaatgaatggaccgtttccttgaaagctgcgtgcattcgctccatcttttgaattacctctcgatgaacatactcattcttttctaaaatcggtatagcccattcaaataccatcttatataaatctctttttattaactcatggtcactattcaccgcatgtaatgctttgtgcagattagctatttcttctccaattgtacttgctagcctttccagcttattcgtatcttttatttctaaaacacttccggcaacatactcatataagcaataatatttttctttatataatacatattgttcatcattttctgtctttactactctctgtactttaattcccttttcatacagttgcttcaaaacatcgaattcaactagaagttgctttatcgatcccgttctctttaaaatgtactctttattcttgcataaaaccttcgctacttttggttgcattacagtagctgtgacatgttcatttcgaaaccaaagctttgcaatttccagtgcttgttccatttacaaataccccttttacaattcttatttcttccgaaaaataacctcacacagtattcccactccaacaccaattgtataagccactacatcactccacaaaaaaccgtatcccaacacgagtccccccaaagtcgttgcacgaatgctatctatccattccgcatgatacaattggctcgcttcaatcccgtagcaaaacattaaactaataaaagccaacttcttcgtctctgttttaggaaacaaaaatccaaagccagtgaaaatcattaatgcccataatgcatcacctaaataatcatttaatagatgtggtagtgcaaaagcaaactttcttgagctaagacctaaaataataacaactatagtaaatagtgcatatactactctatttcgtttcatattcattttaaagtctcctaatatgtaatgtaaaactgtaaatagctagtaaaacaaagttattttactagctatttattgattgcttttatgataagaaaatgtggattcatatttaaataatgatatgatttttcgcttacttctttcattttttcaattgccttcggttccactatctcttctaatacaaaataatttgtagtttcatttagtatgtcttgtaatgatcttctaaaaaacttgacttcaatagtaatattcggtttaacccaagtatctattaataactgtttttcaaaataattttcacatggaaactttgtgaaatccataaaaggatgatgaatagaataaataagttctccacctggcttcaatacacgacgaaattcttgaaatacttgattccaattttctatataatgaagagttaatgaacttacaatcacatcatacgtattatcttcaaatggcaatgtttcttgcagatcatgacaaaggaacgtcgcttcttctcctatattttcttttgctgcttttaccatttcaggacttacatcaattgctgtaacatttgctcctcttcctatgaattgagaagtataccatccagctgcacatccagcatctaatatcttttttccttctagttcctttggaataagctccatcatcgccggtctttcataataactgttatatggatttgcgaaatctagattttctttatatgtactcgctaatttatcatacgtatctttaatcgaatctttcattacacacactcctaatacatattaacccattaactcctgctgctttttctttgaaaatgattgtagtactaaatcatacgaccaatcaatcattttattaatttgctcctgctctatacccttatgaatataaacggtattccaatgttttttattcatatgataccctggaataattgtttctggataatcttctcttattcttaatgcgacttctggatcacacttcaatgtaatcgcagccttttcaccttcttcatgatttactatcgcaaatattttattattaagcctcatacatgttgcactccagccatctggagaatcttctgtcgcttttcttttcgataaacagtacgctcttgttgcattcattttaattggcacctcttattctttccctgtttgattacgatgcatcacaatttgcttcgttgcttgaaattgctgctcaccgtaaaactttattagcttctctccgcaaaatagactaacaatatcaatatgagatatttctcgaagtaacattgtaagcattttctctccaatacctttatttcttacattctcatgtacgacaacatcttcaatgtatgctcgaaaaacaccatcagaaacgactctagcaaatccaactaattcattttcttcccatactccaatggctatactattctttaacattttttcaatatcgacttcttttctttctggccaccaaccgacagaatcataaagcttcttaattttttctgcacagattggttgttcttgttgcaatttatacgtgtacatatgctttctcccatcaatcagtatacataatattattataatctcttttcaaaaaagtgctgactatgaccttttggatgatcttcaacgataccatactctcggtaaccgtgctttttataaaattctggcgcttgaaaactaaatgaatctagcaatattaatctgcaccctttttccttcgcaatttcttcaattttatgtaacagttgactaccataaccgtcatgacgaactgatttatcaacccataaaaagtcgatatgaagatgataaaaatacatcgtacctgttacaccaccaaatatttttccttcttcattttttactacgaggcttactttttccatcggctgttttacttcatctgttaagatggacatattatattgaatgactttatttttaatgtattctccttcaatacgtgtaccgttctctatatgtttcatatacattgcttcctttcaacttagtaagctacattttatttttcccctttaaaatactaatcaaaacgaatccaccatatgtaacaaagcatgaaaagccaattatccctggtacagagacatagcctacccttatgtaatttataactgcaaaacaagcgatagacaataaaatagatggccaaaatataacagctatttttcttcgctctcgtttcgatgtactttctttctcttcagaaacacgtgtgccaaaaagcaatacaatacaaataaggatcgctgcaaagtaaattgtatctaatgacaaattgtgatcatatagggcgattccaacttcaagagcaataatcgttaaaattaaaataatgattgttaaagtctttaagtttcttttcaatcgctcactcctagcatgctttcactatattctttgtatatgtactttaaaactactgcaaaagcttcatctacctctttattttcacggcgattcggtaaatcttttcccccaatcacataaagaagtggaaattcgttaaacattcctattataccaatatttattgtagctgtgagtaatccacctgtcatatgagttatatgataatatggaatttcttcatactctccttgctgtcttaccatgccgctaataattggttcccataattctggttctgatttataaccttgaaaggtttgtatgaaaagggcaagaacttcacttaattctccaacatttttctcatctctagcattctcttgtatatgaatttttgaaaagtacgtttgtgcgtacattttcacagcatcccatccaccacagtgcattacaactgactgtgcaacgtaactatcatgacaagcaatcattacctctaccgcttgactaagtgttaaagaagttcttccttgtaaatgcggatataactgcgcactatcttcatgtggattaaatttaatgtaatgaagtatatcattccaattatgtttattttccttcaccatttgcgttactacaaatccaatgactaattttgctgctgatgctaacggaatatttaattcactattatacgaagcaactatacgattattttttgtagaataaattgccattcccacataattagattgtacctcttttattttatttataacagtttccatttctatccctctttttatatcgttatattaacttctaatatttcaacattgaatgtaaaaaaccttttcattagctattaaaataagaaaaaggtagcatgaattttttcttgctaccgaaaaatatttattcttctataggattttcaggaccgttaagttccagctgataaaaagctaaatctagccatttattaaacttataaccagctttttttattgttcctgcatgaacaaatccatagttttgatgcaaggcaatacttttctcattctctgcatcaattccagcaattaaggtcatatactctctttcctttgcaattttgattaattctttcattaatgaagacccaatgccattttttctatatgccttatctacatacacagaatgttcaactgaatatttataagcaggccacgctctaaatgggccgaatgtcgcaaatcctactactttattatctaattcatatacgataattggatactcttcagcctttttttgttcataccaatctattctattttcaagggttacaggtttatacgcatatacagctgttgtataaagtatcgcatcgttataaatatctaaaatgtatgctaaatcttttttcgttgcttcccttatcattattttcttcctttcatcatgttcaccttattttactatctttttaatagttttattttatcgaaatttccgatttttatctacatacgaatactagcttttcggaaaccatcaaatatatttattgcagcagataacatgtagaagaaaattcctcccccaatgagccacgttttaaactcctctgaggaaatagtaaatgcatttgccaaatacgtaataaaccctgcgttaaatacatgtggatttactacaattacaatgaatactatcgtcccagctatttgaagaatagcattcccaatcgccaatctttgcgtccattgtccctgcactaatttataaagggatatacatatttcaaaaacgatcataattacaacgattggccagtactgcaataaaacatcttgattaaaagttggcgagacaaacttcagtccatttgccgtaccgttatatacgccaacaagataattcgcataaaagtaaagtgtagcccaaactgctgtccacattaaacctccaaaaacttcaaacttcgagattgcttttttctttgggatatacgagatgtttttcaaatcatctggtgtccatttttttaaacttgtcgtcaacggctcgatacctttgtctttatctgttctttctaaaataacaaacacaactgtcaaccagaaaaatacatggaggctcacttcaaaaatttccccaatgcctttacctatcaattgtaaaataacatttaataccgcttgatcaccactatagcctataaaattttctgcaaccattgatatgagtgcaatgacagctgcgattggtataatcatttttaacaacgttgtatatacatcaaaataacgtggtccaattaaatgcatcggtctatccaaataaccattagccaatgaaaccggactccccaatttttcgagaacgctctttacatctttctcattataatcttcaggtaacatatcatctatagttgaccttagttcaagtgtaatatcttcacgatttttttcaggtaatctcttcgcaacctcttggatatagagatcaattaaattcattctcttcctcctcctttaataagttataaagttctttcgaatcctttatccattcttttttcaactgcaaaaatatttctaatccataatcacttaaaacataatacttacgaggtctactctccgttttatcccaactactcgtcactaattcctgcttttctaatcggcgaagtagtggatataaagtactttgatcaattgtaacccctgattgctctaataactggacaagtgaatatccgtactgcggcgttcttaattgacttaaaacagctaacgttaatgtccctcttcttaactcagtaattaacgaatttaataaattatccattcactcacctcatttccattactatatgtcatacagtatgtgttttatactatgtatcgtacagtattaatgtgacaaaaactataattttttaccaaaaaacagataatgaacagctcaaattatatgatttgtgcttttttagctaagttatatataacactctataaggtaacaaccttaactactaattttgaagttccagtaatgctatattaagttacaaatatcgtatacatatgatgtgaacataacatctcactataggaagctataaaaacggtgaattaccatgcttgaataattcccgttttcagcacctaatcaacgttatttccttcataaacttcatcttgttcaaaatctttatttttgtttggtttattagagaaaaataaaaaaacaattaaattaggttaattgtttttcaaatacaaaatctttatttttttaaataacctatgatattcgaaaagacaaattctccaaatgcaagtggtatataaataaaccataactttaatattgcctttgtttctttgtgatcagaatcccccattaaaaccaaccctatcctttttcttctaatattttcattttaattccaataacaaggaaattataccatttattaatgttttagtctattttttctgaaaattaaataaataaaattcttgtattccctcaatattcagataaacataataacttttttacgtttcatcttcaaagtcaataatgactcctgttagaaccgctacattaccaatcgattggatcccgtgaccaataaaatccaccttaaattcttcccactttaatttatgtaatgatataataacactaaattttcaacacgtgcttaatagattggggacttataatggataaacctctcactgcattacaaactattattatacatatgaatacaactgagcattggcatgattttatttgttactgtcagcatcgcgaagcgggacttcgaaaattagcttttaaacatttagagacatttattacaaatgcaaagaaatgggaatcaaaagatcaagaagagtttgccatttcgctgtttactattttagatgtattaaacgaaaaagatgaggtcttaactttctcactaaatagttttctaattgacattctatatagatggacagaaaacaacccatttgattcaagaccttttagatggataggaatttatatggactctagcaataaagaagacgatttagaaaaatcccttcgaaaagcgattgaattaggtggtgataccgaacaagaagccatgatatacctagtttctaattacatcaatactttagaatttggtacacatgaattcccttcaggttattgcggagatttaagtgaatgtatagaaaaacttccctatatgcttcaattaattgatagaattcagaataagaacataaaggagcaaaacattgggcaaatacaagaacaactacaccttattctagattggttaaaacatacacaaattccagtagatgccgttcgtgtacgggaaaaagaacaaactaaggaattagaaaaggtcattgtatattatttacacaacagctcaagtcgttaattcatcgtgtacagagataataaagttgtttaaaaaacgccagtcatgttattcaacaatcgggctatataacggaataaatccttgtaaaaattaaaaatatttgaaataatcgtcattaagttgaagtagagcgattgcagaaaaaggtgatacgactttttcttacttaataattgcatgatagttaaaaaattcaactaattatattccgaaagggtgtgtgtagtatcttatcaactaatgtttttacttataaatctaaggatggaaaaacaataataattagagaagctaaagaacgggatgcagaaagaatactagattctgcttcaaaagctttaataaacgctccatacatgctaagtacggttgaggatgtaaaaaaggtgcgtatcgatgctattcaaaaaacgttaaaagcttatcatgaaaatccaaattatgtacagtttattgctgaagttgatggtaagttagtcggtgcaatagattttaagaacggaaacaaagaaaaaattagtcatcaaggggcttttgcgatgaccatactacccgaatatcgaaattatggtattggaagagctcttctagaaacgttaatcaattgggctaaaaataacagtaagattgaaaaagtttgtcttgaggtaatggaagataatctaggtgcaatccaattatataagaatctaggcttctttgaagagggtagaaaagcaaagggtgtaaaattggatggtagctatcaagatttaatattaatggctttattcgtttaaaattgaacattaatttcaatataaaaagagggtcttcatagtcatctccctgttaagtagacagtaatagaaaccctctttttatatttatctcacattagcttgcagtaaaactccccactgattatagtttcactttattttaatcctttaattaaaggtgacgcttccccactatggaaaatccataggtcatgaagtgatctcgtacatccaacatatagtaactttgcatcatgttttgtgtctttgtaatgttcttcatccacatcaattaaaagcaccgcatcaaattctaaacctttcgctaaatagacaggtactactgatataccaccttcatatttactttggtttgcttcaattacgtttaccgttaatcctgcatttgttaattccacatatatatcacggcattcatcttctgttcttccgattaccgcaattgttttcacatctgcattttgcaaatgttttaccgtcttcacaatttcagtaaattgattttccgcatgaattactttcacatcttccccactgcggaagactggtgttgcgagtcctactgggatttctgcatttttaattatttcatttgcaaattcaataatttcttttgtagaacgataacttcttgtcaattcataataaccggtttcttggaatacttccttaaaagcattccaatcttcaattccttggtaatcataaatcgcttgcgataaatcacctaatatagtgaaagaattacctaatgtaatttcttttaatacataaacttggaaaggcgaaaaatcttgcgcttcatcaataacaacgtgatgaaacttctgcccgatttcaatccctgttatacgatgatgtatgtatattaaagctggtaaatcttctacatacacttcttttttacgacaactcttttctgtttctttaacaagttcttcaggtaatacctcgagtatttctttactttttactattgaactatacagtgaaagagcactcattttcggccaaaacttcatatatgcgttcagtctcttagtcgcttcttttttaagtaattttttctcgtttgtttccccgaattttttaagttcaatttcaatccagcgcttcattcgtcctactaatcgttctcttcttttctgtaaaggataatgtttatattcaacttgcatccattttttaatatcttctactggaataatcgctctatcccacgcctcaaaatcttttgtcggaactaactcattttcaaattggatcattctctcttcaataaacgtcttaaattccaacgtaccctttaatttacctagcattatcttcttttcatcacgattaattgaaaatgcttctttcaatttttcttctgtctgctttagtttcactgaatcatctaacgtacgtaatgcccaatccagaaacgttgtttgactaatattccctacacctaattcaggaagtacactcgaaatgtagtctaaaaacagactattcggcgcaaatacgatcattctttctgcttctagttgttcacgatattcataaattaaaaaagcaaggcgatgtaaagcaattgttgtctttccgctccctgcaaccccttgaataagtaatggtaaatttctttccgctcgaataatatcattttgttccgattgaatcgttgaaacaatatcctttagcttattatctttattctcacctaatcgatatagaagaaaatcatcggcatgcgatacatcttcatttccttttacatatgtatcaacaacacgttcaagttctctttttcgaatggaaatgtttcgttttaaatacacatcaccttctactaacccatctggtgattgataaaatgctaattcttctccaccggtaaatgaataaaacatactggcgacaggcgcccgccaatcaataatgattggcttcatcgtgtccatatccgaaacccctacttttccgatataaatcggcataacttcttcttttccatcttcctgaaaatctaaccttccaaagtacggctcttgcacaccaatacgtaagttttgtctattagactccctcatactttcaagaatttgctctttaaaatcttctccataataaaccggggttttttcaagcttatccaattgctcatccatcgtatgtaaagtatccttcattttttgtaactcatcttcaaatatgttgctcatttcgacgattccctcctgtccgttctaatttttcagtcgaagtatcattgtattaaaaacccaatcataaagtcaatagtttccgtttaaattttccgaaaaaacttacttttcatctttctaatttaaaaagaatatgcaacatcaaaatcacacaaatacacatatagtatagtgatgcatacaaaagatactactttctatttgtctcctatttaatttatccattaacaaatattgtaaaaattaaagactttaatcaatgggcgttttactgcccacaaataataggataaataaaagtaaaggaggctcttcaaatgaatattttgaatctatctcaagattaaatatgcttctatctggctgtatccttatgctttgttggtcaattatgtatgttgaaatatatagacttacaaaatcagtctggccatgtgttatcatgcatgcaatcgaggatgctgttcctactgttttagttacaataacagggattattactcttacaaacagtagtgatttttggttaaatcctactagcggggtcgctgctactgttttatttctcggaattggaatcgtactaagaactataagaataaaaagagaacgacaattattcacacaataaaaagcagataatgaattcgtcattatctgctttccaatttttaaaactaccttattatattttttgatacataagccagtcaccagagtctatcactttctttaacatctttttattctgagcgatatacacatatgcctcaatttccctatcagcaacatatactgtttgcgtgattcgatcatataaatcagtctccgcattacctgtatattcttctagttcatctaacttacacaatatcttatcatttactacataaacttctccatacacctgttcttcaatcgaataagtcatggccggatatccttcattcgtatcaaataattttccatatgtccaagctctgtctgcgatgcatgttgcaccttgcatataatgagcattcgtttgtcctcttcttaatgtgccataaacgaacacatgatacataaattcttatcccctttatatgtctctactttcttatttgtaaataagcacgaatcataaagtaactcacttcattcggaagctgttctttaatagatttcagcccaccctctgcattttgaacggcagtttcaataagagattcatactctgctggaacaaagctttgccaatctacttccattccatcctcatagcagcgaattaaatggttttcaattgtttgtcttgataagttacgttcttttgcaatctcattcaaatcaataccttgtttatacatttcatatgtttctaaatgagaatttgcggatgcttttcctgactttttacgctctgaaactacttctgtcttaatcgtttcagcataatttggattttcctcaataaaatgctgaactgcttgtaagaagtgcgagccatatttcacaagtttgtgttctccgataccttttaccgtcaacaattcagaatcattttgcggcattttcacacacatatcttttaatgtttggtcagagaaaataacgaacggaggtacaccttctccttgtgcaatttctttacgtacttcacgaagcacttcaaataaaggatggtcttgaacaatttgtcttgtctctactcgttcttttcgtaaaacattctctttaccaagtaatacttctttccctttttcagttacttttaacgtcggataagtgccatgttcaactgcaattaactcgtctgaaattaaaaactcaataaactcactgacctcttttacactacggttcgataaaagcccatacgttggtaaagtatgaaaattaaattcaataactttcttattcttcgacccagttaatacttgcgctatcatttgctttccaaagcgttggttcgttctaatcatgcatgataaaaccatttgtgattctcttgtcacatcgatgctctcgcgattgtctgtacaattaccacagcgtccacaatcttctttcggttcttctccaaagtattgcaaaatgaatgattgtaaacattgttctgtatgacagtaatcggtcatattttgcaatttttcaagttcatttgaaaaacgtgattctccagttgattgatcaattaaaaaacgctgtacttgtacatcttgagaagaatataacaatatacatgtactatctaatccgtcacgaccagcacgtcctgcttcttgatagtaactttccatattttttggaagctgataatgaattacgtaacgaatattcgatttatcaatacccatcccgaatgcagatgttgctaccattacacttacttcatctcgtaaaaagagttcttgttgctcatttcgatcactatcactcataccagcatgatattttgatacagaaacacctgccttcatcaaatcttcatataactgatcgactacttttctagtagctgcatatataatcccggattccttttgattttgacgaatataatccgccaaatatgcatttcgatcttgccctttaatgacagaaaacgataagttctcacgctcaaacgttgtcataattgtattttcttgattaatttcaagtgtgttacaaatatcatcacgtacttgcggtgttgctgttgctgttaatgctaatacgagcggcttttctggaagataatctaatatgcgatgtatatgtaaataacttggacggaaatcatgtccccactgtgaaatacagtgtgcttcatcaatcgcaatcatagggattttcatatcaataagttgatcaacaaactccatcgaatcaagacgctcaggcgccacataaagtaacttgtaatgtccttgtttcgctaattgaattcgctgatttgcttctgcaatagatatagaactattaatatatgtagctgaaatgccattctgtaccaatgtatctacttgatccttcataagtgatattagaggcgatataaccaacgtcgttccttcaaatactaatgccggaatttgataacaaatcgacttaccgccacccgttggcataatacaaaccgtatctttcccatctagtacatttttaattgtttcatcttgtcctcttcgaaacgaagaataaccaaagtaggacgctaaaagttcttgtgctttagtaaacaaaaaagagtcacccgcttttctttatctttcatctacttctattatatcaatcacttatgcgacttgaaagggatgattagatgcttattgttttttcattattctatgtttcttcacttatttaatatgaattagcatcattattttatatgttttacaacatttataacgtaaatccagtacacaagaagaaagagtttcaatttaaatgttcattttatttccctttcttgaatactactaatcgtatacatataaattcaggaggttactatatgaaacatcgtaatatgagttccatcaaggcaaaaacgaaaacacaaaaactccaattctctaataatgatgcgtggaaatatgaatcatactataagtaccagccattattctcttataaaaagctttttaattttctttctcaactttttagacgttaatatatgtgcaaaaaatatatcattcacagaatttttctcaatattaaatgtatagacttactacaattcagttgttaccatatataataatctgttggataaaccccttaagttgacctgcttatattagcaggtctttttcatgattacatacttctgtgtacctcgatctcacttccaagtcttttctccattttataaccatatttagatcccaacaattaatgataatcataaattgttgggatttaaattgttcacatataattatgcaattcttctttctcaatacacaaaacacattttacttgttactataaaagtactccagatgagttttttgctcatcgacattatctagttattggggcctgccgcgggaagcaggtccctttgactgtatgaaggtcccaatttcatttggacacatttaccaggttttttcaaaagaattttatgataacattacgtagtcgagtccgacatctcggcaatacccttttgagggtctgcaacttcccttacagaccctcttttactttatattcaatttattcatatataccacaacaccattcattgaatttctccatttcaaattccctaaaaataatctaggacacgtaactaaaaataaatcttcatcatactttgagttatacatgttcaaaggagtgttactatttatgtattcttattggcaatcgtattactccccctaccataacccttatgtaaactatgatttatccgtacggaactaccgaattagtaaaaatgagaattttttaaaagggtatatgcgttctttatgggaacaacacgtcgcttggacgagattggctattataagtatagtatttaatttaccagatgttaatgttactgttggacgacttctacaaaacgcaacacatatgggactatcacttgaaccattttacggtgaggatgcagtgaaaaaatatagtgcattaattaaagatcacttagtaattgcagcggatcttgttaaagccgcaaaagctggtaatcaaaatgcagcggccgctatagagaaaaaatggtacgctaatggtgacgcaattattgaattccttaacaggatcaacccatatatagataaagaagaatttagaaaaatgttttatgaacattcagcactaacgaaagcagaagcacttgccttcctaaataaagattatgaagcaggagtaaaactttacgataaaattgaaaaagaagcattagaaatggctgacatgataacaaacgcaatcgtaaaacaattcccgcaagtatttcaataaagtgaaactttaatcagtgagggggttgttcatcccccactgattatcagctctcaccaatcggcttatttagttttctctccatgatatttcacctctcctctttacatttagcttatatcgatatattttattaatatccgttttttataggaggaaatagtttgattaacgcgattggtctcgtttttatacttacaaataaacacgagaaaaaaaagaaagtttacttaaatgaaaaatttgcactaatagatattattgattctaaagaagtatttgatgatgaagggaatcctttagtagaactaacatgtaaatacagtatatatttagatgaaaaatattactgtaaatctctcgatgattataccggacaagtctttcctttcttaagtgcaaaaataggaaaaggtcttctaagaaacttaaactactacttttcttacgttgatgcctatgataagaaaccaccagttaaagaaataagaccacttatgaaacaagtaactaacagatagccaaaaataccaaaaaaagaaagcatctaactaatctgtaccctttgtaaaggacattttgaaaaaagttaggcaacatcaagaagagaagaagtaacggaagaagaaaaagcgaaagccaaggcaaaagcggcggcgttagcgaagcagaaaagagaagggacagaagaagtaacggaagaagaaaaagcgaaagccaaggcaaaagcggcagcattggcgaagcagaaagcctcgcaaggtgatggggattcgggagatgaaaaggcaaaggcaattgcagcggcaaaagcgaaagcagcagcggctgcaagagcgaagacaaagggggctgaaggtaagaaagaggatgagccgaagcaggaagaactgtccgtaaatcagccgtatttaaatcagtatgttgaggctattagggagaagttaggagagggtgcattagtagattcctacattaataaactgtcaaaggatgtgccaactcttgtggtggatcccgaaaaatattatgaagtgatggagtcactgcgattccatgagggacttgcttttgattatatgtcagagctacatgcgacggattttgtgacacatatggaagtgtatgttcatttgttttcatatagtaagaaacaatcggtagcggtgaaggtaaagctagaccgagaaacgccgcaagtcgaatctgtgacagcgctttggaaaggggctgactggccggagcgagaagcatacgatttgctcggcattatatttaaagggcatccgaatttaacacgtattttaatgccagaggattgggtaggatatccgcttagaaaagactatgaaccgtatgatgtggaggtgtagctatgatccgcacggaagagatgcttttgaatgtaggacctcagcatccgagtacacatggtgtgttcaggctcgtaattaagattgacggggaaattattaaagaagctacacctgttattgggtatttacatcgcgggacggaaaagatcgctgagagcttacagtatacgcaaattatcccttatacagatcgaatggactatttatcagctatgacgaataattacgtcatttgccatgctgtagagacgatgatggggcttgaaattccagagcgtgccgaatacttgcgagtacttgcgatggagctaggaagaattgcgagccatctcgtttggtgggggacaaatcttcttgatataggagcggttagcccgtttttgtacgcttttcgtgaacgagagatgattataaatttattaaatgaattatgcggggcacggcttacttttaactatatgagagttggtggtgtgaagtgggatgcgccagatggttggattgaaaaggtggaagagtttgttccgtatatgagagagcaactggcaggttatcatgatcttgttagcggtaatgagattttcttaaatcgtgtgaaaggcgttggtatatatagcgcggaagaagcgatttcgtattctttaagcggagcaaatttgcggtgcactggagtaaactgggatcttcgcaaagatgagccgtattcgatttatgatcgttttgattttgatattcctgttggaagcgtgggagatgcttgggatcgctacgtttgccgaatgcaagaaatcgaggagtctttaaagattgttgagcaagcggttcagcagttcccgaaagatggagctgtgctggcaaaagtaccgaaaattattaaggcacctaagggagaagcatttgtacgtatcgaatcgccgcgcggagagattgggtgttatatcgctagtgacggaaagaaagagccgtaccgtttgaagtttcgtaggccatctttttataacttgcaaattttaccgaagttattgaaaggtgaaaacatcgctaatttaattacgattttaggtggagttgatattgtacttggggaggttgatggctaatgattgagacgctcttacaatcaccttcaagctggacgaatttcttcatttttttcggattagcggtacttctactatttgcagtccttggcttcgttacatatggaattttggcagaacggaaagtgatggggtttatgcaagggcggattggcccaaaccaggttggaggccgatttggtttactgcaaacggtagctgatgttttaaaactattattgaaagaagatagtattccgaaagcagcagataaaccgctgtttatattagcacctgtcattgcatttgcaccagcatttatggtgcttgcagttatcccgttcactgataaatttcaatttgcagatattggagtcgggttactttattatatcgctgtttccggtattacgacgataggtgttgtaactgggggatgggcatcgaataataaatattcccttttaggagggatgcgtgcggcggcgcaaatgatttcttatgagattccgctcgtaatgagtgtaattggtatcgttttgctagctggtagcctgaatttaaatgagattgtagcggcgcaggagaaggtttggtacattttcgtacagccaattggcttcgtcgttttcttaatcgcagcagttgcagagttaaatagaacgccattcgatttgccagaagcggagtcagaacttgtttctggatatcatacggaatactcagggtttcgctgggcgtttttcatgctttcagagtacgtatatttcttcgggatggcatcgttaattacagtgctctttttaggcggatggaatccagtcatgtttcttggatttatcccaggtgccgtatggtttgctttgaaatttagcagtgtagtctttctattaatttggttccgcgttacgttcccgcgtataagaggtgaccagttaatggagtttggttggaaagtattattgccgattgcacttgcaaatattttcttaacggcattgattaaggagttattcttctaatctatgaggggggtgccagtaagagatgaaaggactatttaaaggattaaaatatacattaagtaatttgagcaagaagaaggtaacgtatgattatccaaatcaaccgttgccgttgccagaccgttttcgaggaattcaaaaattttatccggaaaaatgtattgtttgtaatcagtgctctaacatttgtccgacagactgtattcagttaacaggaaagaaacatccggatcctacgaaaaaaggaaaaattatcgacacgtatgatattaattttgaaatttgtattctttgtgatttatgtacagaagtttgtccgacagaggcaattgtcatgacaaataactttgaactcgcggaatattcacgtgatgacttatttaaaaatttgcagtggcttgacgaaaacgacgaaaacgtcaggaaggagaataaggcatgaatggcgagtttgtagcattctttatactatccttgtctgcaattatcggcggtgttcttatgttgaacttaacgaaagttatgcacatgatgctagctctcgttctgacatttctcagcattgcaggtttgtattttcttttatcagccgaatttataggcgttgcacaaattttactttattctggtgcaatcacaattattatgattttcggcattatgttaacgaaacataacgcggaaaatgaatcgcgtcttactcttcgaaaatggattatcttctttgcagttgtagcatttggagcggttatgtatttcgctgttaataatgttgattttgcaaatgaaagcacacaaggaagtttacctctccatgaaaacaacacacttcaaatcggtacgcttctctattcaaaatatattattccatttgaactaacttcagttattttacttgtagcactcgttggcgcaattatacttgcgaaaaaggacgagaaagaggaggattccaatgagtagcgttccagcttctgcatatttaacacttgcgattattttgttttgcatcggtctatttggagctttaacaaagcggaatacagtaatcgtattagtttgtatcgaattaatgctgaatgctgccaatttaaacttagtggcgtttagtaaattaggcttatttccgaatttaacaggtcaaattttctcactgtttacgatggctgtagcggcagcggaagcggcggtaggactcgctattttaattgctttatatcgcaatcgtacgacagttcaggtggatgaaatggatacgcttaaaggatagcattgtgaccgaaaaagggggaaggaaacaatgatcgattatgcatggctcataccgcttttcccactcgtttcgtttttgttacttattatattcgggaagaaaattagagaaggaagcagcgtacttagtatttttttcgtctttctctcctttatacttgcggtacttgtgttaatagaaaggttttcagaagcaagcgtgaagcataagtgggtgtggcttagagctggagatgtggatatatcattcggctttgaagtgactgcattaggagctttaatgttatttatcgtgacgcttgtgagtctacttgtacatgtgtattcgaaaggttatatgaaaggtgatgaacgattaccaaccttttacgcatatttaggactctttacatttgcgatgttagggcttgttatatcaacgaatttattacagctttatatattttgggaattagttggccttggttcatttttacttatcggtttttatttctttaaagaagaagcgaaggctgctgcaaaaaaggcttttattatgacccgtattggggatgttggtttatttatcgggatgattttaattttttggtacgcaggtagttttgaatatgacgcaatatttagggcgatttatacaggggatctacctccttacatgattacaataacagcgatattaatttttatcggggcgatgggaaaatcaggtcagttcccgcttcatacgtggttgccagatgcaatggaagggccaacgcccgtttcggcacttattcacgcggcgacgatggtcgcagctggcgtatatttagtagcgacgatgtttcctctattttcagcaagtacagtggcgatgcagacagtggcaatcgttggagctttcactgcaatctttgcggcctctatcggtcttgtgcaaacagatataaagagggtgcttgcttattctacagttagccagctcgggtatatgatgctcgcgttaggttctgccggttatgtagctggtatattccatttaacgacacacgctttttttaaagcactattatttttggcggcaggaagtgtaattcatgctgtgcatacgcaaaacattaataaaatgggcggtttacagaagaagatgaaagtaactggtacgctatttttaataggtacccttgccattagcggtgttccgctgctttccggttttttcagcaaagatgaaattttagcggcgacgtggatgaatggcaattacgttttatttactttagcggtaattgcggcgtttttaacagcattttatatgttccgcctatactttcttgtctttactggagaaacgaagacgaaggaagaagtgcatgaatcgcctcgcgttatgacgtatccaatgattgttctcggcgttcttgcggtagtggcaggatatataaatacaccatggtttgggacatttctcggagattggttgacgaaagatgtagggtttaaggttgaagaagcgcatggaccagtttggattatgattgttgcgacactcgtttcatttgcgggaatcgctcttgcatatttcatatatggcaagaaatcaatttctagagattgggctgggggtacggaaacatctctttataatcttttgaaagaaaaatattatgtggatgaactatacaacatgacggtgatccctattacgaaaggaatcgctcatgtgcttcgcttatttgaagtgtatgtagtcgaaggaattgcagttttaattggaagtgtagttaaaggcacaagtaatcttggatcgaaacttcaaaacgggaatgtacaagtgtacggtactgtaacggcggtttcgctcgctgtactcgtcattattttgctctatacgggaggggatttacgatgaatgatttgttgttaacgttcttcattttttccccgcttttaggaattttattgcttgtattaacaccgaaaaaggaattgcgtacagtgcgggcgcttggcttatttgggacggcacttccatttggaattgctatcgtcctcgcttgtacatatgcttctggaaagaatttgtcactatttgatgagaaggtgaaatggattaagttcggcgattttacagcggtggataaaaggtggttttctatttattacgagcttggtattgatggtttgtcgcttgtcatgatggtactgacggctcttctagcaacgcttgcagcaattgcagccttttctattaaaagaaatttaaaagcattttatatgctgttactcatgctagaaataggaatgctcggcgtctttgctgctcaaaacttaatgttgttttttatcttctttgaaattacgttgccaccaatgttcttattaattggaaagtggggaaaattgtcgagtgaaaaggctgcgtatagttatttaatatataacggtattggctcagctattttgctcattgttttctcaattttgtttgcgaaaacaggtacaacaaatattgtggagctgaaagagatattaagaagcataaacgcagagggagcactcgtcatcccaagtagtttgcagcttagtgtatttattgccataatgattgcttttgcaattaaactacctgtttttccgttgcaccgctggatggtcaatgtacacatagaagcgcatccagctgtagttatgcttcatgcgggtgttttgctgaagattggagcgtacggtattattcgcttcgggaaagggctattcccggaatattttcacgatgttgcaacactaattgcgatattaggcgtaattaatttattatacggtgcctttttagcgctcatccaaacggactttaggaaagtactggcttactctagtatttcgcatatgggaattgtgttaatgggacttgcgtcacttaatgcacctggtacacaaggagcgttattccaagttgtatcacatggtttaattgcagccttgctcttcttcctactgggtgttatagaacaacgatttggaacttcggatattacggtgctaggcggacttgcgaaaagtgtaccgatacttagcggattctttttagcaggaggaatggcatcgcttggattaccagggatgtctgggtttgttagtgaatttcttgcctttctcggtttatttcaaggagagcccgtcattgctgcagtcggtgtgattggcatcattttaaccgctgtatacgtattaagggcgacacttcaagtgacatttggaaagaaagagtgggaagcaaaatctgatatacacggatgggagtatgtccctgttttactacttatcttttgtattattgcaattggagttatgccagagttactaggggatccgcttcaaaatacattgaaaacattgggggtgaagtaggatggatatgaatacgttacttagcttatcgtggcatctaatggtgccagaatttattattctcggcgccgccatccttctttccatatgtgatttgttttttaagctgaatcatagatatgtagctcttggtgcgattgctgctatcgtattagcaatcgtgtcattaattacgctatatagcgaactagctggagatattttaaacggatcgtttgtgttagatggattttcaaaagggtttaaaacattgctattaggtgcctcagctcttattttatgcaccgcaatgagcgatgataagaagaatccaattgaagataagggtgaatattattacttatttttaatggcacttcttggtgcgatgttcatggcttctagtgttgatttcattacccttttcgttggtttggagttactttcactttcttcttatattttagtaggaatacgaaaaaagagccgtgcatcaaatgaagcggcaatgaaatacgtcattagcggaggaattggaacggcgattacgctcttcggaatgagttatttatacggtattacaggttcaactaacattgtagatatgcaaaaggtactcactggggaactcgctagtggtattcagttattgttagctctcgcatttcttttattgctagtcggtctctcatttaaaattgccacagtgccgtttcatatgtgggcacctgatgtgtatgaaggagcagctacaccagttactgcttttcttggaacgatttctaaaattgctggtttcctactcattattcgtttgttccttatggtttttgcaagtgtattaatacaaggagatatgcaatctttatatgggcatatgagtatatatattgcggtgctagcaagtattacgatgattgttgggaatgtagtcgcgttaaaacaatacaatataaagcgtttatttgcttattcgggcattgctcatgcagggtatttactcgttccacttgtcgcattatcaccatttacgatggatagcatgtggttttatatgctggcatacatgcttatgaatataggtgcatttgctatcatccacggcttaatcttacaaaatgatgaggaaaatataacgattttcacaggtttatataaaaggtcgccatttgcagcgattatgatgacaatttttattttatcgttggctgggataccaggaacggctggcttcatcggaaagattaatatctttttaggcgcgcttcatgtagatccagcacattacgtactagcttcgattatgatgggtacgacagttgtttcattcgtatattatttccgtattttacaacaaatgtttttccgcacaggagagacagaagagaggatacggttaccgttaaatataaaggttgttatgagtctttgtgcaatttcgattgtaatactagggattatgccgatgattgggtacaatttcttttatgaatattttccattaatgaaagatttcttcttcttagggaacgtggtacaatagtgaaaataaaaggtgtggagtcagtactctgcgctttttattttgtgttaacttgtaatgtagatatacgtttttggaaagaaaatcacgatgtaaaatgtaagatgtctatgtgcatttgaaaaagtgtagctcctacttattatggtatcgtttttatattctttcataagtagtagctgagtaaaaaggggtcgattttttggcacaacttttagggcaacaagcactgattgccattgtttcgcatttattgtttattaccattacgtggtgggccttacaaggcattcacattgagcgtttaatgaagtccggaaaagtgctgcagacgcgagtattactcatcttaattacaattgcaattgggacatctgtaagtaactttttccttgattatttaggctattcgaagagtttaacgtatttagtaaagtaagtgtatagaacctcaaatctccgttaacaatggggataggaggggatgaaattgaagcttaaagccattcttattgttgcacttagtgttgttttatttttggttggatatagagagatgaaaccgataagcgatgaacagaaaatggagagcatgatcaaggctttagagaaaaatgatgctaaagtagaaaaatggtcatggttagcgagagaaacaaaaacaatttctaacatacatacgtttcaaaagttgttaaacgatgtgaaggaaaaggcaaatattcaaaagtgggaagtagagcaatctccagatggatataaagctacatcctataaaaagctttcttcttatgaagaacgagtagtagtaacttggagtaaagaaaatactaaagaaaacactttcattatctttgaagtaagtggggcgaaatgggacccgaagtatgttcaaaacatgaataaaatttttagtgaaaaacctataatttacacttgtgttcaaggtgtactgaatgataagattgaaggtgttttgcaaaataaaaccaatcaggttttgaaagatctttcagcaagagcgatcgaacaagtagaagaaagagcatttgtgtcagtctccgcatacaataaaaagtgggatgacgctctttcaacaaatagagagaaaataaatgtgcaaatagcaatacgttctacagacaacaaagatacaattgtggttggcacaccgatcataacttctgagtattgagtgaatagatactgaaaaaaggacacggaggggaataatttggaaaagatcatcgtccgtggcggaaagcggttaaacggcacagtgcgtgttgagggcgcaaaaaatgctgtattacctataatcgctgcagccctattagcgagtgatggaaagaatgtactatctgaagtaccagttttgtctgatgtatacacaattaatgaggtattacgtcatttaaatgctgaagtcgtatttgaaaataatcaagtaacaatcgattcttctaaagaactaaacattgaagcaccatttgaatatgtacgtaaaatgcgtgcatctgttcaagtaatgggaccattattagcacgtaacggtcgtgctcgtattgcacttcctggtggatgtgcaattggttcacgtccaattgatcaacatttaaaaggcttcgaagcaatgggagcgaaagtacaggttggtaacggttttgttgaggcatatgttgagggagaactaaaaggagctaaaatctacttagacttcccaagcgtaggcgcgacagaaaacattatgtctgcagctacattagcaaaagggacaacaattcttgaaaacgcagcgaaagaaccagaaatcgttgacttagctaacttcttaaatgcgatgggagcgaaagtacgcggagctggaactggaacgattcgtatcgaaggcgttgataaattatatggtgcaaaccattctattattcctgaccgtattgaagcgggaacattcatggttgcagcagcaattactggtggagacatcttaattgaaaatgctgtacctgaacatttacgctcaattacagcaaaaatggaagaaatgggtgttaaaattattgaggaaaacgaaggtgtacgtgttatcggcccagataagttaaaagcggttgacattaaaactatgcctcacccaggtttcccaacagacatgcaatcacaaatgatggcattattactacaagctgatggaacaagcatgattacagaaacggtattcgaaaaccgctttatgcacgttgaagaattccgtcgtatgaatgctgatattaaaattgaaggtcgttctgttattatgaacggtccaaacagcttacaaggtgctgaagtagcagcaactgacttacgtgctgcagctgcattaatcttagctggtttagtatcagaaggttatactcgtgtaactgagttaaaacatcttgaccgtggctatgtaaacttccataagaaattagctgcattaggtgcaactattgaacgtgtaaacgaaaaagtagaagaagtgaaagaacaagaagtttctgatcttcacgcttaattgaaatagtctctatgtcttttgacataggggctatttttttgggttattactgttatagtcaataaattctatacttatgcacgtaccagtaaaaatatttagaaaatttctgttttatactcttccccttaagtatgttctaaaagaaagagttgttccataagaatgaatggagtaaagcttttatattgggggaaaataggatgaaattttcaaagccactttttattacagtagcgctcttaatagcgctcgttatcattgtacctgcagcccttgttattccatttgcgaaagcaaaagtaggggaagaaacggcctctaaaactcctccagcgatagaaagcataccagctccaggaaaagtagatacagctgttcaagttgctgtatatcgcgaaaaacagaagaaggtagaaacattaccagtggaggagtatgtgacaggtgtagtagcttctgagatgaatgccagttttgaaatagaggcactaaaggcgcaggcattagcagcgagaacatttgtagtacaacgtatgttaagcggaggaaagaaaaataatgcggacgtgacagatacggtgaaagatcaagtgtacaaaagcaaagatgaattgaagaagcaatggggcaataactacgaaaataatttgaagaaaatcgaagaagccgtttcgaaaacagcaggacaagttttaacgtatgatggaaaaccaatttcagcatccttcttttcaacgagtaatggccgaacagaaaatgcagctgactattggggaaatgattatccgtacttgaaaagtgtagatagtccgtgggatcaagcctctccaaagtttacgagtgagcaaacatttacagtagctgattttcaaaaacgtctcggtgtgaaagtgttagcagacgggaaggttggaaatattaaagaccttacggaaggaaagcgcgtaaaggatgtagcttttcaaggaaaaacattaacaggaaaagaagttcgtgaaaagttagatttacgttcttctgattttacgtggaaacaacaaggagataaaatcatcgttacgacgaaaggcttcggtcacggcgttggtatgagtcaatacggggcgaacggcatggcagcggaaggaaagaaatatacagatatcgtcgctcattactataaaggcgttgaaataaagacgatgaatgattatgaaggaaaattgatggtgaagaaataggtgtcagaactctggcgtctattttttttatgtaaaatagaataattttccattaattgtttgatataataggataaaaagacatttgggggagacgaaatggcgctactggagttgaaacagttagggaaggcgaaccagttaccggaaattgagctaaaggttgaaaaaggacaatgtattgttttgcaatgcaataatcatacagctaaagtgttacaccgcattattattggtcaagaagaagcttcaactggcaacgtactgtttgaaggggaagcaattggaaagaaaaattattcccgcataggcttttgttttttgaaggatgaagcatatgatcgtttgaaggtgaaggaatactttaagtttttaatagggctttatgaatcaaagataagtataaaagaagttgtgcagtctgttggtctcctagataagctaaacgttaaaatagaaaaactatcattttcagagaagcgtcgtcttcatattggacgaatgatgattcataatccggatttaatcattttggaagaaccggagcaaaatgtagatatagagagtacggttattattcgaaaagcaattatgaaaatgaaagaacaaggaaaggcaatttttattacgtcatcttttctatcggatgccctttcgttaacagaggatgtatacatattaaacaacgatggtgtgaaaaaagtagaaattgaacaagaggaagcagaagaagtcgatgaagagaaggtcgttcaaataattccgcaaatgaagttagaaagaatacctgcgaaagtgaacgataaaatcattttacttgatccgatggaaatccatttcattgaaacacaaaacggagtaacacatattcacgttcgtgaaggagatttcgtatgtgcattaacattaagcgaactagaagcaaggttaacaggttttggtttctttagatgtcatcgctcgtaccttgtgaatttacaaagagtgcgagaagtgattacttggactcgtaacagttttagcttaattttagacgacgaaagaaaaagttcaatcccgctttcaaaaggacgaatggatgaattaaaaggtgttattggactataaaagtgctccaataagctcaatatgcgattcattcaccggtaaaaatactccttttaccggtattttaatgcgcctaccctttgtttttcatatgattgagtcaagaaaagcgaaacaaacgaacgaaaagcgctaaagcgactttcatctataaagaagaaaaacaaaggggatgaagaaatgacattggcaattgaaatgaaagatgtaatgaaaagtttcagtggaaaaacggcacttcgaaatgtaaatattgaggtgaagcaaggagagatattcggattccttggaccgagtggatctggtaagacgacaacagtaaaaattttaacttctcaattgcttcatagtgttggaacggtaagagtattagggaaagatattacaggaccaagtagcatcgattacaaacgaattggtattttaacagataacagcggcttatatgaaagacttagcatttatgataacttactattattttgtgacttatacgattgcaaaaaagaacgaatcgatgaagtactagcacaagtgaatttattagatgataaaaaaacaccagtaaaaaaattatcaaagggaatgaagcaacgcgtcacactagcaagagcaatccttcataaaccagatatcctcttcttagacgaaccaacatctgcacttgatccagtaaacgtacaaaacattcataaaatcttaaaagacttaaataaagaaggaacgacgattttcttaacgactcacaacatggacgaagcagaaacgctttgtaaccgcattgccttcctgtgtggcggagagattgtagcacttgatacaccggagaaccttcgcttacaatacgcgaaagatcaaatacaagtcgtgttaaaggataagaagaaagaaacggtacaaaaagatgaattaggtgcaaaacgtatttcagaatggatgaacaaaggagaattactatccattcattcacacgaaccaactttaggcgatatctttattgaagttactgggaggggattataatgacattttcaatgagacgtgtatcagctatttttagaaaagaagtacaagattttaagacaaattcacaagtgttgttaatggcatttttaccaattatactttcatttttgtttagcagatttggagtgggaaaggaaatgttaggcattactactataacggccttcctatttgtcgcagggtttgttcaatctatggtaattgcagaagaaaaagaaaaacatacattgcgtgtattaatgctatcaccggcatcttcggttgaagttctacttggaaaaagtatattaacagtatgtttgacattgggcatttgtattgtgaacttatttattttggatcaattcagtggaaatctattattgctaggatttattttcttatgtggaacaattttatttattgtgattggaacaatgattggattgttagctgcatctgtaccacaaacatcaataattggaatgccgatattaatgacgatgtatttggctgtacagtttgagccaatggttgaaaataaagtaattaagacgatgattggatatcttccaacatctcatattgtgaaagcacttaacagtttagtaggtggggcgggatttggtagtattagtgggcatgtattaaatgttgcagtttggcttattatatcgctctttgtatgtttaatcgtatataaaaagaaacaattagattaaaaactgagccaaaagtgctcagttttttcttttttctatcatttcctcggaaattttacaattcttatacatatttttacagattttgtcgaaaagtaattagttatacgttgtataggatacgtgaatattgttcaaaatgattgctgaggtgatgatggaatgcgaggaagaaataataaaaagtcgcaaaaggtagtacatttatttcaaaaaagatgggtgtttccggcactatacattgcttgtgcagcggtaatcttaatggttgcgctatggttccaaggagctaatccgaagaagactccaaaccacgatcaagcaacaccgtatacacaatcggaagatccagcagtaccagtaacaaaatcttcagaagtagtgaaaatgccagctgccgcgaatgcggaagtagtcgtacagaagaaattctatgaagatgcagcaactgaggcggaacaagaaaaagcacttgtcttttataacaacacatattccccgaataaaggaattgacattgctgcgaagaatggaaaagaattcaatgttgctgctgctttaagtggtacagtaacgaaagctgaaaaagattcacttcttggttatgttgtaacagttgatagtggaaatggtgtagcggtatcttatcaaagcttaggcagtgtgaaagtagaaaaaggtgcaagagttgcacaaggtgaagtattaggaacatccggtctaagtgcaatgaataaagaggcaggttctcacgttcactttgaagtacgtaaagacaatgtggctgtgaaccctgaacgttacttaaataaatcagtaacagaaattaaagctgatgcaggtgctgcaaaggctacgaatgcttctggtaaaaaagctgatgacaaatctcaaaaagaagagaagtcaacgagcacgaaacctgaaagtaaaacagaagacaagtctcaaaaagaagagaaatcaacaagcggttcaactagtgacaaaaaagaagaaccgaagaaagaagaaaaatcaacaaatggttctacagaatcatctaacgattcttcttcacaagaataatgaagtgaaaaaatcagttcccactaggggagctgatttttttatttttatataaaaatactcaatttcgagaaaaaagttgcaataacaaggaaaaatgacgagattctcgaatatatattacaaaagggaggggatactgtgtcatttttgtttgttctgtcgactgctattattttattgtttgttttattcactttatattattacattgccggtaagaaagaggttccccaccatcaattgttagaagaagaattggaacgagaagaatgacaccttatatataaggtgtcattttttttcgctataatagtcagttttaacgtatttctcacaaaaaaacgtaatttttcttaacttagtccgcaaaaatagtgaacatgtagcatatatcagtagtgcgggcaatacaatggtataaaccaaagcaaagagagtgtttgaggtgagaaatcgtgaatcatttcattataaatccaagaatgtttaacgcttacaaacagcactcacacttacttcttagtcgtatgcagcgaggctcatttcacccttctcacatccaaattagggaggcgagtggtgtgcacgattacatcaaagagagaactatcaagattggtaagtatatcgtggagacaagaaagacagtgcgtgtcattgcaaaggaatttggggtatcaaagagtacagtccataaagatttaacagaacgtctaccagaaattaatccagagctcgcaaatgaagtgaaagaaattcttgattatcataagtctattcgtcatttaagagggggagaagcaacaaaacaaaagtatagaaaagaagatgtagagaagcctgtacgtcaataatgttacagtagcaaacattccgttcacattcggtaatatttttcagaagaattctttttgcgaatattacgtttctgttaaatttatgataaaatcagaaattaggtgaaaagaattcgggtgtaacctgattttgaatatcgaggaggaaaaaacgggaatgtttgcgcgagatatcggaattgacctaggtacggctaacgtattaattcatgttaaaggtaagggtattgtattaaatgagccatctgttgtggcaattgatcgtaatagtggtaaagtattagcagtaggtgaagaagcgagaagcatggtgggacgtacgcctggtaatattgtagcaattcgtccacttaaagatggtgtaatcgcagactttgaaattacagaagcaatgttaaagtatttcattaacaaattggacgtaaagagcttcttttcaaaacctcgtattttaatttgttgtccaacaaatattacatcagtagaacaaaaagcaattcgtgaagctgctgaacgttcaggtggtaaaacagtatttttagaagaagaaccaaaagtagccgcagttggtgctggtatggaaatcttccaaccaagcggtaacatggttgttgatattggtggaggtacaacagatatcgctgtactatctatgggtgatattgttacctcttcctctatcaaaatggctggcgataagtttgatatggagatcttaaactatattaaacgtaagtataagctattaatcggagaacgtacttcagaagatattaaaattaaagttggtacagtattcccaggtgcacgtagcgaagaacttgaaattcgcggacgtgacatggtaacaggcttaccacgtacaattacagtatgctctgaagaaattacagaagcattaaaagaaaatgcagctgttattgtacaagctgcaaaaggtgtattagagcgcacaccaccagaattatctgcagatatcatcgaccgcggtgttattctaacaggcggtggagctttactacacggtatcgacatgcttctagcagaagaactaaaagtaccagtattaattgctgaaaacccaatgcactgcgttgcggttggtacaggtattatgttagagaatatcgacagattaccaaagcgtgctttgagataatttgaaagaactaaggctaatgccttagttcttttttgtttttatatttttttattttgtttttttgcgaaaatggaaggaaaatagagaaatatgaaggaaacaggtaaaatattcatatatatggttaaatttaatatttccttaattgaaaacgtttataatataatgagtcgaatacgacattaaggcaaataatgtttcaatacatattgcctttccctaatttgggcatacactcttttccacctccgtgtcagttgcaaaaatgtgcaactattttaatggaatagagtgtgtgcattttttttaggaagttgtactaaatataaaatgttactttgtaatgacaaacaataaacaaaatgggataatagcaatatgtccaagtggtaagaccaatattacaaaaggggcgattgttacatgctaaatatagaacaaattaaagaaatcattcctcaccgctatccatttttacttgttgataaaatattagaagtagatgaaggaaaaagagcggttgggattaaaaatgtatccgcaaacgaagaattctttaacggacacttccctgactatgcagttatgcctggtgtacttattgtagaagcattagcgcaagtaggagcagttgcagtattaaagaaagaagaaaaccgcggaagacttgctttctttgcaggtatcgacaattgccgtttcaaaaaacaagtacgcccaggtgatcagcttcgtctagaagtagaaatgacacgcgtacgcggcccaattggaaaaggaaaagcaatcgcaacagtagatggtgaagttgcatgtgaggcagaaattacatttgcgattggtgataaaaaagaatagatagtactgaaaaatctccttgtgaaaagacaaggggattttttaatttctgctatataacgatgaaacaataatatacaaactaatcagaaaataacttgtaaatagatggaaattaccatatacttactttagtatttatctagaaaacaggataagtgataaaggtaataaagaaataagggcattgtcatattgttaaggtacttaagtaagacaaattagaatgttattgattatgatgagatatggggaaatcagcaaaaatattaattagacgtatgaaatcgagcataagagagagaaaagggaaatgtcgcatttcacaaaaggagattatgaatatgttcgggagaaagaaaagaaaaccattacgacaattaattacacataaagagcctaaatcgcgtattacagaacaataccgtaacattcgtacaaacattgagtttacatctgtagataatcatgttcgttctattattgttacttcggcagatccaggtgatgggaaaacaacgacaatctcaaacttagcagttgttttcggacaacaaggaaagaaagttttattaattggagctgacttgcggaagccgacgatacaaaacttatttgccattcatagttcaaatggattaacgaacttattatcaggacaagcaaaacttatgcaatgcattcaaaaaacagatatagagaacgtatacttaatggcagcaggtccaatcccgccaaacccagcagaactattagggagccgggcaatggacgaggcattgctagaagcatataacatgtttgatattatattaatcgacacaccacctgtgcttgcggttacggatgcacaaatactagcgaacaaatgtgatggaatcgtactcgttgtacgaagtgaaaagacggaaaaagataaaatcgtaaaagcgaaacaaatattagataaagcatcaggcaaaatacttggagtcgttttgaatgataaaagagaagaaaaagagcagtatggttattactaaaatagaaacaggccaacaagaaatacttgttggctttttttgtattcttaaatttatttctcaagttacatagcataaaaagcatgatatgataaataatttggagaatcattggaatgtgttgtcatatttaagattattttgtaagattatacttgtttcttgtgaacaaatatagaactaaattattaaaaataaaaaatgtaagatttatatgttataatttttcctatgtgtaaattttagaaagttggaggaacctatggaagaaacaattagtttaaaagagttatttcatatcttaaaaaaacgtttagcaatgatcctcgtaatcgcctttggtgcagctattgtaagtgctatcattagcttcttctttatgacaccaatctatcaatcttcgacgcaaattcttgtgaatcagaagaagcaagagggtgcaatgttccaagctggtgaaattcaaacgaatattcaattaacgaatacatataaggttatcattaaaagtccagtaatcttagaacaagtgaatgaaaaattaaatttaaatatgacatctcaagtgctaacaggaaagattaatgttgcgaatgaaaaggattcacaagtaatctctgtaacagctgaggataaagatccgaaattagctcgcgatattgcgaatgcaactgcagatgtatttaaaggtgaagttgcaaaaattatgaacgttgataacgtaacagtattatctaaagcagaagttgcagaaaatcaatctccaattaaaccgcgtccaatgttaaatgtggcaattgctttcgttgttggtttaatggcttcagttggtcttgcattcttactagaatacttagataacacagtgaaaaaagaagaagatgtggaaaacttacttggcttaccagtattaggaattgtagctcgtatggatgaagaaacaatgaacgtgaaatcacacgctccatcatcaagaaaagtgaggggacaaacaattggctcttaaattatttaaaaagaaaaagaatcatcgtcaacgccgtcaattaattgctcatcaacaaccgaaatcaccaatttcagaacaatatcgtaatattcgaacgaatattgaatttgcagctgttgatacgaatttacattcattaatggtcacgtctgcaaatccaagtgaagggaaaacaacaacgacagcgaatatggctgttgtgtttgctcaacaaggaaaaaaagtattattaattgatgcagatatgcgtaaaccagcaatgcatcaaatgttccaagtagacaatatttttggactaacgaatgtattaacacatagtgaacgtttagagaaatgtgtgcaaacaacactagttgataatctacactttttagcttgtggtccaatccccccaaacccagctgaattgttaggttcaaaatcaatgaaagaacttcttggacaagcatacagcatgtacgacttagttatttttgatatgccgcctattttagctgtaacagatgcgcaaattatggcaaatgtatgtgatgcttctattcttgttgttcgtagtgaatcgacagagaaagaaacagcggtaaaagcaaaaggattgttagaatcggctaaaggtaaattgttgggcgttgttctaaacgaccgtgaacgtgaacaaggcctatactactactacggtgcaaactaattttaaagtgagatatggtaaaaacatatctccttttttcccttgaatatgagcgatatctcatattcaagggaaaaaagatctttataggagagagggaggatgaaacaaatgatagatttacattgtcacattttaccggggatcgatgacggtgcacagacagtaacagatagtttagcaatggcacaacaagccgtttcagaaggaatacataccattgtcgcaacgccacaccatcaaaatggaaaatatgtaaatgaacgtacctcaattattcatcatgtaaaacaactaaatgatgaactacaacaacataatatgccacttaccattttacctgggcaagaggtcagattatatggcgatttattagaagactatgaagctggtaaaatcgttactttaaatgaaacaaataaatatatattcattgaattcccatcaaatcacgtacctcgttatgcagaacaactactatatgaattgcgcgtaaaaggaatgattccaattatcgttcatccggaacgtaatgccgagttaatcgagcggccagataagttatataatcttgtaaataaaggtgcattaacacaagtgacagcaggtagtttacttgggaaatttggaaaaaaaattaaaaaattctcactacagcttgtagaacataatttaacacatatgatcgcatcagatgcacataacacgacatcaagaggatttcatttagcggaaagctatgaactaattgagaaagaatttggaatgagtgttatgagtgatttgaaagaaaatccgtacttattaattagcgggaaggcaatttataaagaagatccagaacaaattcgtcgtaaaaaattgttcggtattttttaaataaagaattggtgatgtctcctaaccgttatcaacggaggcactcggtcgtgctgtgggtagaaatttttatttcgaacctaccttagacgcttgtcgtcgggagtatgacgtgaggatgggttggatgcccataatttatttatgttagaaactctacttatggagttgtaaagacgaccctataagtagggtttttgttattgttacatgtggatataataatatgtttgggggtactagatttgaaaaaagtaagaaaagcaattattccagctgcgggactggggacaaggtttttaccggcaacaaaggcaatgccgaaagaaatgttaccaattgttgataaaccaacaattcaatacatagtagaagaagcgatagaatcaggaattgaagatattattattgttaccggaaaaggtaaacgtgcgattgaagatcattttgatcattcctttgaattagagcaaaatctcttagaaaaagggaagtatgaaatgcttgagaaagtacaagcttcatcaaaaattaatattcattacataagacaaaaagaaccaaagggtctaggacacgcagtgtggtgcgcccgtaaatttattggaaatgagccatttgcagtattacttggtgatgatattgtgcaagcagaaacgccatgtttacgtcaattaatggatcaatatgaaggtacacaatcatctgttatcggtgtacaaacagtaccagaaaatgaaacacatcgttacggtattattgatccagttgaaaggaatgatcgccgttatcaagtacgccaatttgttgaaaagccagctcaaggaactgcgccatcaaatttagcaattatgggacgttacgtattaacaccagaaatctttatgctccttgaagatcaacaaacaggtgctggtggggaaattcagttgacagatgcaattcaacgattaaatgaaattcaacgggtatttgcatatgattttgaaggaaagcgttatgatgttggtgagaaattggggtttattaagacgacaattgaggtagcattacagcataaggaattaaaaaagcaattaataaaatatatgaatgatttagtacataaagaaatcaatgaataagattataagggagagggaatatgaagactggtgaaaatatagcgagagaatatcaagttacatcagatgatcaaatcgttcaagtcgaaaatagacaatccaagttatatttagggagtaagtatatattagatgttatattcgctttactaggcttgattatattggcacctgttatgttgatatttagtttactaattattttagaatccccagggtcgcctttctatttacaagaaagattgggtatgaatggtaggaagtttaatgttattaaattacgttctatgagaaatgatgcagaaaaaaatggtgcaaaatgggcagagaagaatgatccacgtattacaaagataggattatttattcgtaagacgaggattgatgagctaccgcaattatttaatattttaaaaggtgaaatgtctcttgtaggaccaaggccggaaagacctatgtttactgagaaatttgagcgtgaaattccaggttttaaaaagagactagaggtaaaaccaggactgacaggatgggcgcaagtaaatggtggttatgaaattacaccgagagaaaagttgaggctagatatatattacattaacaactccagtttattgttggattttaaaattatattaaagactattaaggtagtatgcacaggtgacggagctagataatgtatcttataaatacaggatggtattagtatgaacttacaattaattcttaaaaatgcttcatttttatttgtaggaaatgtgatggtacgaatgttaaccgccatttcagcaattgtgatagctaggtatcttggggcagaacaatatggtattttaagtattgcattagtattttccacttttgcaagttcaatgacagatctaggattaactcatacatttattagggagggtaccaaagctgataaagatatatctaaacttttaaatagctatttggtaacaagattattcatttgtatattctcctctgtaattgtatttattctagtaaattttatgtatagtcagaaagaaatgaaacaggtaattttcttgatggtaatccctacaatatttggtgcagcactacaaaatgtaggagcggtatattatcaaattatcgaaaaaatgaaatatactgcaattattcgaatcatggcaggcttaatttctgtcataggtcttcttattggagtttattttggatatagtcttttaatggtagccttaacttatgggctatgtagtattttagggggtattataagtatctcttttgtcattaataaaattaaattgcataaaggattagataattctattttaaatgggttaagtgcttttacgttaactgcttttttaacaatacttatgcctttaatgggacctattgctttagaaaaggtatctagtttagaacaggttggctattttaacgctgcattacgtatcccctctgttctatatcaaattccaggtattgtagcagcagctttttatccagttttgtttaagcttattgatagaagtgagctaaaaaaacatggagaggtaatagttatcgaaatcaagttaatgactttattgtctttaattatggttctacccataatactatttccagaagaaatttcagtttttctgttaggggaaaactggataggaattgctgaaacgctttctattttatctattattgtttttattcaatcaattaactttcctttagcggatagtttaacaactaaaggtttgcaaaaatatagatctattgcattattaattagttttgggacaggtatttttgcgtactcgtattttggaaagttatacggtagtttaggagcagcaatcgcagctgttttaatagagattgtactattactgggtttaataatttttaataagcagggaatatttaccgtgtttaggggtagttctaaaagtttattaagtttaatttttttgtatgtcataaataaattatttctaggaaatattaatatatttatctcattagtaataagttatctcattgttttaattgttattctatcagaaaaagatttaataaaaaatatgattcaaaaaaagaaatctattatgtagaggaggctataaatgtctgttcctgagatatctataataattcccacttataatgtagaagaatatatagaggaagcgttaagttcagtacttaatcagagttttaagcaattagaggttatagtaattgatgatggatcacgggataaaacagttgaaatcattcaatctttacaagatgagcggataaagctatatgaaaatggttctaaccaaggtccggcttattcgagaaactttgggatttctaaagcaaaaggtacttggatagcttttttagatggagatgactggtgggatcaagaaagaataaaagagttgcttaattttgctagaattaaagaagctgacatgatatttgatgatattttcctaatatatgatgggcatgtaagtccgtatgcaacacaatgtcaaaattacaaagaaaagcttgaatctagccttaatattaccccagagttattagtagagttagatttaggaatgcaaccgataataaaaagaaatctattggagaaaaaaaatataagatttaatgatcaattgatatttggggaagattatgttttttatcttgaggtactatgcgagtctaataaatgttatttttataataaaccgttatacttttataggcagaggggagattctcttacaagacaaaagacaaagagaatccaacagttaatacaagcaaatagggaactgttaaaacatgaaaaatttcaagggaataaaaaattaattaatcaattgcaaggtaggatggtaagactctcaaatctaaatttatattatagcttcattgaaaaaataaaagaaaaagatattaagggtatagtgaaaaatatatatttaaatcctaaggtaattttaatattaataagccgtttaccaaaggtcttaaaatacagactagggaaatttattaaaagtagaggttaaaatatgaaagacaaaagttttgtacttcaaaagatggatagtaagaattcttatgtttataactctattttcataatgttaatttcactattcattttatatgtgccggtagtaaatagcatgcaaccattaataaaagcaccatatagttattatgctaattttttaattatttttgtgctgtggttatttaattttttaaatagtaaaaatgctaattttactaaagaatatttgcaatcaatgggctgtttatatgtcttaggtctttactgtgctatttcaagtttttggagtgaaatacaatttgaaactttatggagaacatttataatttttggtcctattttcgcaatggcatacattgttaatgtagatcgaatgattgaaaaaacattgattgctagttataaaattcaaatgttagtaggtttatttttagctatcttaatgatatttattaaaatttttggattaatgatgtggtttaatgacgaatattcactaaattatattaccttaggtcctataagaatagaacaggcagtttattattcaggagcgacactgagattttcatctattacaggaaatcctaacatattatcatacatactattaatatcattagcgaccactctgattttgtttttaagacagtcaataaaaactttctattttataatatcatttttaattcaatgttatgccttgtttttaacatattcaagaacagggatattggcatttggaatcttcttatttctgttcttttggttaaataatagtaggggaatgaaccgtttaagaaaaaacatttggaaattcatgagaatatctttgattctaagtgtttttgcaggaggaataatagcccttttattacagggaagtaaccagcgattaagcttagatttggcaggaagaggaaaagcatgggatttattagccgatgttatttcaaaccatttctttttggggatagggttcaattctagtcaagagtttttaagagaaatgaatgttggagtaaatcatgcacatagtctatatttaggtattacagctgagataggggttatcggtttaggattatttctattttttgtctgttgtacattagggattttaattcaacagtttcaaaaatacaagaacaacttagagtataaaaatcagtggctcatgtattctggaaatattgcaataatagtagctattttattccatcagggtacagaattctctttattaagaaataattatctaaactttttatggtttttctttatatttactacaataaagttaggtagtgatttaattaaaagagagaacggaggagatcctgttgcaaaaaactttagtaataggggttaaagtagagaacatagaaaaagaaatgtctggtccacaaaaggtgttcaatagtattgttaatgatatagataatgaggatataattgttttaggaagggatataagagcatgtataaaagggatattttctagagatgtaagtaatttgcatatatttggttttacacgatcaaatgcattgttagttataatagggaaaatattaagaaagaatattctttataccgcaaatggcttagtatcgcgggaaaatttgcacttctctaatctgagaatttcttgtaaaatggcggaatttattactttgaagcttgcagatggtattatatgcgtgtcagaagggttaaaggaaatgattataagtgattataaaataccaaaaaagaaattgaaagttattccaaatggcgtttccgaaaaatttctgactataaagccagacaaaaatatttttaacgaacttattcctttagaaaaaagaaaaaagattatatttactgcttgcggaacttttaagtacaaaggaattgaacaattagttaaagttgtgaatgatataaaaagggatgattttatcttagtaatcgctgggccaaagggaaatgttcatgacaaggtaatgaatatgatggatcctaaaaaggttatatatataggtaatttaaatcaaagtgaattgataagtgcttattattattcaaatctttatatccaaaatagcttatatgaaacttttggcttagcaccattagaggcattagctgttggtacaccagttatagtaagtaaagatgttcagatgaattatttgcttaaaaatacaagattagaacactttattataaataatgacgaggagctgtctgaaaggattaatttaatattagataatcctaatattaaagaggatttaagtatcagtgctaagaaaatagctcaaaataatacttggcaggatatacgtcagcaatataaagaattatggagcgttattaattaagtgataaaagtatggtgagaaaattgggaaatgaatatttagttaatgttatagtacccacgttaggaaatagaattgagtatattaaacgcttatttaatagtttagaagagcaaactattaataatattaaagttattattgtgtctcaagaaaatcatgatagaattagcagtttattaatgaaatacaattttaattaccatcatgttatattaagcaaaaaagggttatctcatgcaagaaataaaggtttagaatatgtggataatggtattgttacgttctctgatgatgactgctggtatcctaaaaacgcatttgaaacggttgttgaaggatttaaatataggaatatcgacgcgctaagttttcagatatttgaccccgaaattcaacaatattataaagaatatccacaagctcctatagaaaaattaggtattcgcggggttttaaaaatttcatcaatagagttctttattaatttaaataaaattgatattggagatttgaagtttgatgagagatttggtcttggggcaaaatatccatctggtgaagaaaatatcttgctcgcagatttattgaaacagaaatatagtatagcttatgttaatcaaattattgtttttcataaaaagaaaacatcagaaaataaactaattgattctaatacttttacaggaaaaggaccattatttaaaaggatgagaggaactattccagctatatgtatgctaacaattttctttgtaaaaaaatttcatttaactgaaaaaccaattcgctcattcatcaaaagttttaaagagctgttaaaattttgatgaaaatatcaaagaaaatctgaaggagtagtattgaaatggaaataaatctaagtgagattgaaatagggaatcaatcacttgtgtcaattattatcccatcatataatgcaagttcttttattaaagaaacaatccaatctgtccaatctcaaacttatacaaattgggaaatgattattatagatgatgtttcaaaagataatacttgtgaattgataaaagaagagattaagaaagataatcgtatacgattaattgaattgcagaaaaattgtggagcagcaattgcgagaaacacgggcattaataatgcaagagggaagtatgtagcttttttagatagcgatgatctatggctacccgaaaaattagaaaaacaattgacttttatgcagaataatgatgtagctttttcgtttacgggttatcaaattatgaatcaagatggtacccttactgataaaattgtacatgtgccagaaaaaattaattataatggattattaaaaaatacaataattggttgtttaacggtgatgttggatattgagaagctagggaaagtacaaatgcctaacattaggacccgccaagatactgcaacatggttaaaaatattaagacaaggtcattatgcctatggcttagatgaggttttatcgaagtatagaaaagttgaaaactctatttctagtaaaaagttcaaaatggctaaaatgaattggaaattatatagggaaattgaagggttaagtatcctaaaatctgcatggtgctttataaattatgccctaaatggagttgtaaaacattttgttaaataagttttaaaagcctttttctttaaggggctttttttattgttaataaataaggaggataaaaaatgaatattgctattttcggaacaggttatgtagggctagtaacaggggtttgtttatcggatattggacatcgtgtaacttgtattgatattaatgagaataaagttgcgaaaatgaaagaaggtatttcaccaatatatgaacctggtttagatgagttgatgagtaaaaatattaatgataatagattgttatttacaaccgattgtcgccaagggattgaagaagcagatgttatttatatagcagtaggtacgccacaacaaacagatggttcggctaatttacaatatattgagcaagttgctttagatattgctaataatctaaaaaaagattcgattgtagtaattaaaagtacggtcccagttggtacaaatgatcatgttaaaaatttaattcagcaaaatttgaaagcagatgtgaaaatcaacatggtatcgaatccggaatttttaagagagggttctgcaattcatgatagtttctatggagatcgtatagttattggggctgatgatgctaaaactgctgatgttatggaagaagtgaataaaccttttaatgttcctgtttttaaaacaacaattagaagttcagaaatgattaaatatgcagcaaatgctttcttagctacaaaaattagctttattaatgaaattgctaatatttgcgaaaagttaggtgcggatgtagagcatgtagctaatggtatgggattagataaaaggattggtacacaatttttaaaagcaggtatcggatatgggggctcttgtttcccaaaagatacacatgctttaatacaaattgctggtaatgtcgagcatgattttgatctgttaaaatcagttattacagtaaataataatcagcaggcatcgctcgttgaaaaaataaaaaatgtattaggtgatatggaaggaaaacaagtggctatgcttggtttagcttttaaaccaaatactgatgatatgagagaagcggcatctattgttattgcaaatgatttagtaaaaatgggtgcgaaggtcgtagcttatgatccaattgctactgaaaatgcaaagaaagtattacctaatgaggttcaatatgtgccctctgttgcaggagcagttaaaaatgccgatgtaacacttattgtaactgaatgggatgatataaaagaattccctattgaacagtatatcaaattaatgaaacaacctattatttttgatggtcgtaattgccatggtttagaatatgtgaaaaagtttaatgtagactattattccgtaggaagaccagctgtagttcgtgaaaaagtttctttataattagtgggtaatttataggatgaaaatctgtaagactaatttttataaataaagaaattttttattaacctagctattttaaattctagctagattaatgtttacatgcttattataaggatatgtagtaatggggaggtttgttaattatggcagtacttgtaacaggtggagcaggatatattggtagtcatacatgtgtagaattactttaaagaaaaaatctaagtctgaaataggacttaaatattaatatacgaggaggatatatgatgaaagctatcgttgtaacgtcgttcggtggtcctgaagtgatgaaatatacagatttggatataccggctatttcagaagatcaagttttaattcgcgttgttgctactagtgtaaatttcgctgatattaaattacgttatggtaaaaaaggaaataaagcactaccttttattccaggtatagatgccactggtattgtagaacgtgtcggttctcatgtgaaaaatattcaccctggacaacgtgtcattgcttttcctcaaaatggatcttacgcagaatacgttgttgcaaatgaaaatcttactttcgtattaccccatgaagttgactttcaaactgcagccgcttgtccaatcgtatcttttacaagctataatttactcgcaaatgttgcaaggcttcaacaaggtgaatctgtactcattcatgcggctgctggcggaattggcactactgctattcaacttgctaaactattagaggctggagctgattatgttatttgtcatcaagatgaagattttgtagagaaagtcaatgaactgacaaatggtgaaggggttgatgtaattttagactctatttctggaacggtttctgaaagaagtttaaactgccttgcttattacggtcgcctcgttcatttcggtaatgctagcggtgaaattggtaactttcaaacgaaagatttacatgcaagttgccgctctatactcggttttagctttggaaacacacgaaaaaagcgtcctgaactgctccaagaaactgcaaatgaagttttccgttatttgcgtgacggacgtttacaaattaaggctacgaaatcttttccacttcaaaatgcagggaaagcacatgaatgggtcgaaagtagaaaaagtacagggaaagtaatactaaccgtttagtcctcttcctgaaatgaatactggaaacagaggtggcattcatgggatcacgaattatgcatgttattatcgctagtggtattgctgagaaactatcaattcacgataagacttctttcttacttggagctgtagcccctgatgctgttcattcaaaaaaagaaaaaggaacctcacatttttatgccggtacaacgaagaactatacgagaagaatagattatgattcattttttcataaatatgaatcacatatagattccccatttattttaggctattatacccacctcattgccgatgataattggctaagtggattttttctaccttggctaaaaaatagaatagagaatgacgaaactatcgcacccctgtactataacgattttaaattgttaaatgcaaagttgcttcatcattacgatcaagaacaacagcttttctctcttctcaatcaagaggctcacattgtggatattgaagaggtttctagagaaaacgttttagcttttcgaaagtatctttttgaagatatgttgtatccaaagcaacatttgcatgaagacttacaagtatttacgtttgaccaaatcgttggctatattgagacagctattgaaaaaggagtattttttattaaacaactctctaatgaaaaatccacttcaaaaatttaatccccctcaaatatatttgagggggattttcacatagcaatattattattggttcttctccataaccgcaaaataattcccttcgctatcagcaaagttaaacactttaccagaagacatagttaccatttctccaacagtaacatttttatttgttaaatctgtatatagttgatcaagattttctgagaagaacattaaagacggtgtaccaagattcaattctgggctcattttcgaaataacttctttattatgtaatataatgctcgtttccgcaccgcttttcggagcgatttcaatccatctcattccttgcttattatcttcctctgcaactacatgaaaccctaccttctccgtccaaaaatttactgcctcatcttgattatttacatataacataatttgtcctactttatggatcattacatttccccctaatggtttttatattctatgtagctttctacaaatactatcgttattccttttgagttggtatgtacttctttgcaaaatttatcgactgactcatcccatccagttcatcaaaataatcatttctttcaatcatgttatatccgtcgaatccaattttatctaatactttgaagaatatatcgaaatctacttcaccattccctgctgcgacttctatatacttagttgaacgatcacttttcacttctttacaatctttaatatgagtttgtactatataatcttttaatagtaataaaccttctcccggattttcatttacatcacttattaaatttgctgggtcaaagttaacagctagtcctttcgagtttgcagtttctaaaaatcgttttaatactattgctttttcagatcccgtctcaatggcgaagaatcctccaaatctgaacgctaagtcccctatttcattacaaacacgtagcattttatcatagtactcactattttcatcatcagggattttcccaatatgggctgttactatgttagctcctaaccttaaccctttatcagtaatatatttaaaactctctattacacattcagcttcagttcctattattccattttctccgaagctaattgctaatgacgggacttgaatctcattaaaagataagttttcttttaatgtattccattgtatctttgagatgttagctaagttgaaagtcggattcatagcatataattgaatatattctaaatcccattcccttgctttttgtattccttcgtttacttcaatatattttgtattcaaaaacattcctaatttcctatccatatgtgtaccttctttttattatttcgcatcattttaatattcgacttttttatattatttcctcgtataaaccaaataaataaactacccttttttcgatactcccagtagaagcatatatatgataggcacattaaaaacactaatacaattcccattatcacttgtttacaaacaaaaaagacgtaactacaaatagttacgccttctccatcatttatctaggctttttcttcccagtaaatgctggtttctttttctttggtgctttcggtttcgtttctacgaatgatcctttgaacatttcttgcttcgtaaatacgatgcctagttttttcgcaaattgcagtaatttgcgctcttcttgtggagttacaagagatacgacagttccttctttacccatacgtccagtacgtcctgagcggtgaatgtattggtctactgtgtctggtaattctaagtgaattacatgtgttaaatcgtcaatgtcgataccgcgcgctgcaatatcagtagcaagtagaatttctaatttccctccgcggaaagcacgcattgtcgcttcacgctcttgtttacttgcttctgcatgaagagccgccgctttcattttacggaatttcaatttctcagtaatttcatctaaacggaatggatcgtttaagaaagcaactgcttttacatcgcccatatgcataattcttcttacgtaatcatttttttcgcgtcgctcacaaatgatatacgtatgctcaactaagctttttgattctgcacgtgttacacgtactaattgtggttccactgctaaatcacgtgccgcatcttctgccgcttttgtcattgtcgccgagaagaatactaattgacgatcgcgcatcgttgatttaattacatcttgcactgcgcccatcattttttgctttacaatttgatcaaactcatcaaatacaattgtttttacttcatgcatttttagctttttcatacgaattaattctaaaatacggcctggtgaaccgacaattactcttgggtgtttctttaatttttcaacttggcgcttaatatctgcaccaccaattaaagatgcacctgaaatttcagttcctgctgtaaacttttgaacctcttcatgaatttgcattacaagttcacgtgttggcgctaaaacaacaacttgtggctgttttacttcaggattaattttatgtaaaagtggtaataagtacgctaatgtttttcctgttccagttggagattcagctataacgtcttgtccttctaaaatagttggaatcgcttgtttttgaatttcagttaactctttaaaaccagccttctcccaagcttgttgtaaaaatggttgcatatcttttatcatttgtttttctcctttatctctatttttgaagaaaatgctgtattgttcgcaccgtttctatcatgtgtgaaataacagctattaaatcatcaacatggtcttctgtaatcgctttttgaaatagaacctctaccttattatgatatgaaatcgcttgcttattatattcgtatgaaactttctgcataatcattctttcttttccccatatagaacgcattaatgtttcaattccttcgcattttacttctggttgttctaacgggaataaaaatgctagcttcatttcacaacctggtgtaaactgaggcacttctagtatttcaccagacaagttctttgcatccacagataatgaaaatgttgcttctactaatggttcaaacggttctgttaattgaaatgagatatgatatatacgacttaatgaagcaagatccatcatatcttttcgatctgttacaagaatatctccatgtagatcaaaatcatacacagcaccttctacgattacttttaaattgtcaaaagcagttggatcaaacataatttcctccaaaaaacaggcgcctttcgatggaaaggcgccacttgatgtatatatagtttacagataaacgagatgaattacaaccttttagaataaacctactgcttttccatcttcatttacatccatttgaagtgctgctggttgttttggaagacctggcattgttaacattgtacctgttaacgcaacgataaagcctgcgccgatagatggttttaactcacgaattgtaacgataaagtcagatggacgacctaattttgttgcatcgtcagaaagagagtattgtgttttcgccatacaaactggtaggttactccaaccttctccttcatattgagctaattgcttacgtgctttcggagcaaattcaatatcttttgcgccatataccttttgagcaattgtacgaattttttcttctaagggtaattctaattcataaagtggtgcgtagttgttttcacctttttcgatttcttttagtactttttcagcaaggtcaactccgccttggccacccttctcccaaacttctgttaaggatactgcatagccacgctcattacaccactcttgtaagtatgtaacttctgcatctgtatctgtaatgaatttattaattgcaattacgaaaggcacaccgaagctttgaattgtttcaacatgcttctgtaagttttccataccttttgctaatgcatctacattttcttcttttaattgatcttttgcaacgccaccatgcattttaagcgcacgaatcgtcgcaacaataacaactgcttctggtttaatgccagctgcacgagctttaatatctaaaaacttctcagcgcctaaatcagcaccgaatccagcttctgtaataacataatcacctaattttgctgccattgttgtagcgataacactgttacaaccgtgagcgatattcgcaaatggtccgccatgaatgatagctggtgtattttctaacgtttgtactaagttcggctttaatgcgtcttttaataatagtgttaacgcaccttctacacctaaatctttaaccgttacaggttgatttgcaaagttataggcaactacgatgcgagataaacgtgcttttaagtcttgaatatctgttgcaaggcagaacacggccataatttcagatgctactgtaatgtcaaaaccgtcttcacgtggtacaccttgtacaggtccaccaagaccaattactacgttacgaagggcacgatcatttaagtcaacgcagcgtttccaaacgattttacgcgtatcaattccaagtgtgtttccttgttggatatgattatcaataaacgctgctaatgcgttattggcagttgtgatcgcatggatatctccagtaaagtgaaggttaatgtcttccattggtacgacttgtgaaaaaccgccacccgctgctccaccttttaatcccatcgtcggtccaagagatggttcacgaagtgcaattactgttttcttaccaattttgttaaaagcttgacctaaaccaactgttactgttgatttaccttctccagctggagttgggttaattgctgttactaaaacaactttaccgtctttcccatcttgtaagcgcttaaaaatatcaagagataacttacctttataatgcccgtatggctctaattcatcttctaaaatatttaaatcagctgcaatttcttgaatcttcttcatactcgcttcttgtgcgatttcaatatcggatttcactgttgtagtagttgtcatataccctagtccccctttaattggttctgatgatattgtatcagttttttgtattttctgcacttatttacctcctaaaaattctttcatttctttatacgttttttaacataaatacccataagaatgttaacgattgttgtaactctgtaggtagttgacctaacatcttctcatttactccgcgcttatatacgccgatgccatctacaactttaaaaccttgttctttcgctaactgttcaaattcccaaggcatcatcgtattacaaacaacgtcttttccgtacaagcgaggataactgttctctcgtggctttgctgtcggtcctaaaattgcaatacatgcatatccatctttctttaacacacgctttatttcatttaacgctcgtaatggctcttccgtccattctaaagaattaattgccataattgattcaaattgctcattttcaaatggtaatgcagaaagatctccttttataaaagataaattcggtccttctccgcgttccttacctttttgaatcatcacttccgataaatctactcccactgctttatagcctgcgcgacttaatttatatgtaccgtagccatcaccacaaccaacatcgagcacttgtgcttctttcttcacgtattgttcaaaaaacggaataattgtacttctgctaccactgtcccacatctcttgactattttgattccaaaactctgcgctactatcccatttcttctccgctgactcgtgccaattaaatttcgtcatacattcccctaccttcacgtattatcattcatttcattctacatcattttccaaaattcctgttttatcccgcttgcagtaagacacctacctcaaaattcaatggatgcggattagttaatgggagagaactgctcataaaaatccaattgttgctggctgataatcagtcctagtggaaaaaatcccacactttatcttcaataggagatggatatgttaacgatggaatgcgtattctccaatttttgctttacttgggtttaactcatactcatgctccttctcattttgaaagatactatagatacacccaattgaaagagagggatgtacatgcgaagaaagagaaatcatcattttaaaagtggtgaaaaaaacgaagagtatgctgctgaaatatcaccagctggcattccaattagacataagcggaaagaaattgcaaatgagatagaaggtacaaataccggcacaatggtaggctatgtcgctttatttctttcgttattctccattgctttttatccagttacgctcggctccctagcaattttagttggcctattagctgtcaatttcggagcaagaacacttggatatacagcaattggttttggtagtttttctgttttatttactttactttatccgcttgctttgtcagcgttttaaaaaaacacaccaagttatacttggtgtgttcattcatgatacaacataatatgaccgcatccacaacaatgtttcgctgtaatttcttgaaacactggataattttcttcatctcgatgctcaataaatactttttcaaatcgatacatgtttggtgcatatgcccaatcttgtttcgtacgtgcatataacgttgaggaaaaaaactcctcaccaccgcaaacgatacatgtgttcttcatcgctatccctcctatgcttgtcttacttcatctatatgaacataagcataaaaaaaagaccttctattactagaaagtcttctctgaaacaaaaagaaatgtaccaaacattcctactccgctatattcttttgaaacaccagcttctgttttaaatgtttgctttacagtcataaagaatacaccatttcgtgcatctgtactttcaaattgtagtttttcttttttaccatctacattttgcgtgcattcaaaactactctcattacaattcaacgcatacttatcctctacatacactttaaaatctgattctttcggacaagttataagtaatattgccacgagaataatacttataatacccacaattgtataatatttcttcatttgtactcctttcaaatgacaagaaaacttgacttcatacgccaagttttcttagtcaacaacccattgccactcttgttctttcttatcaaaaatgagccaacctgtttctgttgcttcctctttcaattcatcgatattatctaacacctcatccgtactttcatacgaaccaactacatataccggaatttcaagacctcttcttgactcaatcttccctgctagatctatgtaaagaccatcttccattagtggaatcagtcccatgatcaattcttttgaaattgctggaaaaatttttgatttttggaagaaagaaaaacgtttcttaccgaaagcaccgagtttatacggaatgactttacttaacattcctacaaaatcagcaattctacgataatacactttgttgtaccatccgtcatcatgtgaaaaataaacaaatcgatttttcaacagcggaaagaatgttcttgcaagtggttcttttttgtgagccaaatataataattctgcaatttctttcggctctaattcatctaaatcgcttgcatcatcaaaatctacccaacaaaattcatcaaattcatcaatctctgcttgaattaacttatgtatattttcttcctcaacatattcaaataaagtatgataatgaaaatccgtccattcaaagttgtgcttcaaaagcaacacttgatgaagcggtgaagggatgttactcgcaaactctttaaacgtaattcctgatgtaataaaacaatgacctcgacgattaccattaatatatatcatattctttacttggtcagatcctccagacaaagcacctagccaccttcgttttatatgtttcaattctatagcatattttaacatgaaaaattttagaaacatagaaaaaacttcaaaaactatttacaatttcatgtgttttattacatagtgattacaagaaaaaacgcctgctcataagcaggcgtttttaaaggatttcatcagggttttgaggatgatgatttccctctttcttttcttctttttggaacatcgattgaattttatcaattgtttgtggagctaattcaatcattttttctgctaaatgtgtcgcattttgtaaatgaagaatatttactccatctttattcaccacaagaaatgctactggtgtaatagaaacaccacccgcgctaccgccaccaaatgcagcgttaccgtttgctctttgtccatcattcgtttggaaatcagaacctcctgctccaaaaccgaacgctactttagaaaccgttaacaccacaccaccgtcagccgtttgaacaggctctccaacaatcgtatttacatcaaccatttcttttaaattttccattgctgctttcattaacccttgaattggatgatccaccgttcataacctcctttgtcatatctttcctagtttttccgaaagtttgtgaactaaacataaaatttaatattgatttcaaaaaacttaagttgtaatatttagaaaaataaaaaagaggtcgattcgttatgatgcgaaaattaacaaagaaagatcatgaacaagtattcgcttacctaaaagaagaagcagcccttaacttgtttattattggagatattgaagctttcagttatgacacagattttcaagaactatggggagtatttaaagagaatggaacattaaaatcaattttactccgattccacgattcatttataccatatagtaaagaagactttgttaccactgattttgaggcacttctttccgcatataagccacttaaactctctggtaagtcaactattgtagaaaagtttgaaactgctccaagtctacaattaggcgtcaaaaatgaaatgtatttttgtgaatgtctaaatgacaacaacttacctgacacgcctattcatgaaacgattaaacttgcgtcactcgatgatatagaacgaattatgaaattacgaagtgacattgctgaatttccgactactaatgaatcagagaaaatattaaggcaggctatcgaaacgaatacaggacgcacatactatattgaaaaagacggcgtgatcatcgcatccacctctacttccgctgaaaattcattatccgctatggtagttggtgtatgtacacacccgaattatcgtggaaatggctacgcttcactcatattacaaaaaatgattcaagactttacgaaagaaggccgaacactttgtttattttataacaatccagctgctggacgaatttataaacgactaggatttaaagacattgggatgtggacgatgtatcgataataaggggtactttataagcagaaatagttataacttaacaataaaagcagattatacacaatttcatactgttattatgaagataaagaagctacttgcggagcaatgactctaactaaaacatgttatgtattcaagctaaatttagatagataaacgccccaattgttgcatctactccaacaattggggcgtttatcctcaaattcttcccactatatttatgaaacatttattccacttatgtcgctattatctttccgtacaaatgcccttctaaatattactgcgtcttattatactttgctttaaaatcaatatattcctgtttcgcatcttggttattaccttggtgactatcaaaagatgtatgtatttgtgatatgtattttactaacttgccttcatcatttcttttcttataatttattacaatacttacttccaatatctgctttgaaccatttttagaatcaatatgcaatgcgattgatccaccatcatattcatcatattgtattttcaacttatcattaatgatactctgaaactctaattcagttagtttgtatccaacagtactaggctgatcaaacttttttatatcatccccgggcttcatctttagtttccctatcccttttaaacgatctacaattaagttcacatatgaaacatccagatttgattccggactttgtacctgtccatttttatacataatattggtacgataaacaacttcttctttattatctttgctgtctactgctgaagtaacctcttgtgttgtatttccatataaacttttatctttcgtattatatatcccttccgaagtttgatagattgtttttctatgctctccatcttccttttgctcatatgtactatatatacctctttgttccacatacgcatatccatcatcactcgcagacataacctttttcatgtcaccttcatccaaatctttgacaaatggctcatattctatctttttttcaaaaaaactacatgcttgtagtaggctgattgttattatgatagtaatcattttagaaaccttttttgtgttcatttcatcatcacactacccactctacattttcgatcagataaccttctaatcactttaatcaccttacataattaaattttcttttagaagttaaaatactctcctgtaaataattacttttctatcatcaaaacgtacaatacgcactttctttatgccttacgtttcgatttaccttttttatttttctttcgatatcttggagtctctcttttatgttgctcccacgttttattaaatgatggaaatttaaatctgcaatatgctaatagctgaaattcagctgcaccgattgctatcgtatacattaaaaaggtccctactacatacataaataaatcatcaaacccataatcgttatgaaaatatatcaaaataagaatagttactgcgtatagtgtagcccacttcatcatctttccttttgttttactaaagaaagaagcagacctctcatccatactaaacgcaccttcacttgccaatttaaatgtatctattgttgttacgatatgaaaaattactgctcctaaaagcaataaacccgcatacagtattgtaatccaatcaattgaattattagccattttagtaacagtcaaagcaataggagctattgttgccaattggaatgaacataataatacgacaagggtttgtagtttttgaaatttaaattgagctatcggaaatgaataaatgacgaaaagaattatttgtataatatataagaatacttctaacttaacaattcctatattaaagagaagcatgcagtaatcccacccggctgataaaacaatagaaaaaatggttattgaactaaatagtattcctccaaacataaatcctgtagccccctcaggacttaaacgatcattacatgtcatcctaaacttatctaaatcttcttcttttatattccacaccttgacatttcaccttctatacagtttaaataatttccatttacttcaattctatttcactcttatttacttttcgatttggattttgtatttcgctttcgaattctccctcgcattctctcattctcttcccatgacatattaaatgacttgaatttaaatctacagtacaccaatagttggaattctgccgctccaatggctactgtatacagtaaaacaatacctaccgcataaagaactaaaacatcaattccataaccattatgaaaatatatcaaaataaacaggattagcgcatatattgtagcccacttcatcacatctccttttcttttactaaaaaatgagatggatctttcatccttactaaacgcaccttcactcgcttgtttaaatgtatcaattgttgtcacaatatgaacgatagctgctcctacaaataataaccctacacaaattaaagtcattcggtcaattgaataatcagatatcccaggaagaactaacgctgtaaatgttattgtacctaattgaaatgcatataataatacaacgagcgtttggaacttttgaaatttataacgtgcttttggaaatgaatatagaattaaaaagatgaattgtaagctatataaaacaatttcagttttaacaattgttttatcaaaataagtatgataataatccaccccccccataaaaataaaaaacataaatactgaagtataaactatccctccaataaagaaaaccatagcaccctcaggacttaaacgatcattacatgtcatcctaaacttatctaaatcttcttcttttatattccacatcctggctcttcaccttctatacgtttcaattatttttcaaacactaaaattctattaatatattatttatttttcattttgaatttcttattttgttttcaaattctcccacgcattctctcattctctgcccatgacatattaaatgacttgaatttaaatctacagtacgccaatagttggaattctgccactccaattgcaaccgcatacattaaaacagttcctactccatacataacaaaaaaatcaattgaataatcattttgaaaatacatcaaaataagtagtattaatacatatattatagcccccttaatcatagctccttttgtcttactaaaaaaagaggtggatctttcaccactactaaacgcaccttcacttgcttgtttaaatgtatctagcgttgctacaatatgaataataactgcccctacaaatagtagccaagtatacatcctaccagttgaattgtcagccatttcagagacaatcgaaactacaaataatatcgttccaagctgaaacgcatataataatataacgagcgtttgtaacttttgaaatttaaaacatgctttcggaaatagatatataattaaaaatataatttgaatactaaataacacaatttcagttttaacaatagttctgtcaaaaaaaatattgtagtaattcaaatcccctacaaaaataataaacatacatattgaaatataaaatattgttccaaacataaaacccgcagcaccttcagaacttaaacgaccttgacatgtcattcgaaacttgtctaaatcttcttcttttatgttccacattcagtttttcaccttctatacagtttaaataattttcattcactaaaatcccattacattcttaacatttttaagtacataaatctttgtacaactaaattcacataatcttttaggtatattattaccatattacttaccataatcatctaatcagaatgccttttgatggttcaagtagtgttctttttcctcaaaagttccaaatattcttctttcaattaagtataaccgtcttcttgtcaccttcatccaatgcctttattagactctcatactctattttgatttaccaaaactatacgcgctcagtaaaacataactgttatcacaataactattttttactacccttttactcatatcttcacaacatttatcgttctcaaaattcaattaaaatatattatttttgatttatatactctttttcataatttacatattcttttttggaactttgattattatcttccctggtatgataatatgttgaaatctcttgattgcgttttataagcttatcttcttttttttcttcataatttaccgatattgttatttgtgttattctcatttgattttcttttgtattattaggcgtattaaattcaatcatcaatattgcagaatcaaatttatcatattttaaatttaacttatcattcatgatgtttttaaactgtaattcagttaaatcatagcttattatgctcggttcactagatctttttgtatcttcactcggtttcaatttactaagttcatttaatcctctaaacattaattttacatatgaaacattcatagcttgatcctgggctactgaacgggatttttcattttttaaatttgtactatagaccgtttcttttttgtaattttgattactaccaacgtttttatcattttttatatcagtaacaaccttttgagttgttttcccatataagtcgtcttctttcacattatatactccatgggttgtttgatatattatcctgctatgttcaccatcttctttttcttcataagtactgtcgctagtctcttctttcacatatgcatacccatcatcactcgcagacataaccgtcttcatatcaccttcatccaatgcctttactaatctctcatactctatttttgtttccccgaaactgcacgcgcttagtaaaaacgttacagtcattacaataactattttttcaactaaccttttactcataccataactacacctttccccttattttatacattacttgctattcgaatattgtttttcatacttctcatatcgggttttagaagctttatcgttatcttctttactatttaaatagattgctattttttgatcatgccttattaatcggccttctttattctttttttcatatcccattgtgatgcttattgtagtgaattccattggattttcttttgaatctttcgccgaactaaattccattaataatattgcttcatcaaatttatcgtagtccacctttaacttatcattaattatttcttgaaattccgattcggttaagtaatatgttaccttggatgactcactaaatctttttttatcttttttgggtcttaaactatctattccctttaatctattaaatataaatcgaacattcgaaacatccaaattttgatctggactttttgattgattatcttcatatttaatactagttctatatacaatctcttcttttttttgctcactatttaatgaactagcaatttcttgcaaagttgttccatagaactttttttctttaatattgtatactcctcctgttgtttgatatacaacgctaatgcgattatcattttccgcccaaaacgtgctatccctaacctcttctttcacataagcatacccatcatcactcgcagacataaccgtcttcatatcaccttcatccaatgcctttactaatctctcatactctatattcgtctccccaaaaccacatccacttaataaatttgctattattgacagaactatcatcatcttggctttcttctttaacttcatactgacaccccgttgatttctctaggcatttttaagttcattatgttcctttttggaaagtaatacatctcacctttacttactgatatttacttactcgtacagattatattgaagatgctttaatttttaatagcattgatttatatacaatcctcaattgcttatatattctattcgaattttcagaaaccaaaacttattttatttctttcgctttcttttcctccctctctttataacgctttaagaattcctgacgttccctttcatgctcctcccacgaaatataaaatgatggaaatttaaatctacaataggctaataattggaactctgctgcacctatggctactgtgtacattattaaagttcctcccgcatacaatccaaaaatcttcagtgtataatcattatgcacataaattaaaatgagaagagttaacacataaattagagcacacttaattgcaatcctctttgttttactaaaaaatgatgaggattcttctcccgtattaaatgcccctttacttgcctgtctaaaagtatcaatagtcgctaaaatatgtaatatgactgcacctaaaaataataacccaacatacattaatgtaatttgatcaattgaataatttgacattcccgggattatcaacattgtaaatgtaatagtacctagctgaaacgcatataacagtaccacaagtgtttgtagtttctgaaatttaaatggcatcttaggaaacagataaataattaaaaaaattacttgaagactataaagcactaactcaaggctaacaattattttatcaaagagagtcgggtaataactccaaccaaaccttattaaccctacaataagaaaaaacattattaatgaaataaaaaacatcgttccaaacataaaccctgtagcccagtcgggacttaagcggttcttacaagtacttttaaattcatttaaatcttcttcttttatattccacatataattacaccatcttttctaaaatcatgtaataactctatttttgtagacaaactgaaagtaaataaatgtttttagtatttcatattaaactagccttttttactttttttaacaaacacaaaatacagcgatagcattagtattaagcctattccacaaaccaatacacctccatattctttctggtataaaaaaataaacatagtaacaatatagctcggtattgacaaaataatgagccacttccccagaaactctgctattttatatagaattaaaaagataaacataatcccaacaataataggtgctattacaccttcaaaaaaacctttttctttttttacggctttagaatctttattcaagatcttacattcctccctttactagttaatttatgaataatgtattcattctatcttcaatataagtttacgagtatcatttacaactttcatttcagtttttgtttcgcttttgttctttctctcttattctttttctatttgctataaattcttggcgttccttttcatgttgttcccatgtaatattaaatgatggaaatttaaagcgacaatataccaataggacgaattctgctgatactacagcaaatgtatataatattattgtttgtgtcacataaattgccatttcatcaaatgcataattaaggtttaggaaaattaatataagcaaaactattacacaacttatcatcccaattaataaatataatttcatgttagtaaaaaacgagacagccggtcctttcaatttatatcctccatgctttgcttttctaaaaacatcgatcgttgctacaatgtgagtacacattgcacctaaaagtattaaaccaacataaaccagtgttttattatcacatggaaaatcaaagatttcttcaaccaccatagccataaatggtaatgttgctaactgaaaagaataaaatacggtcacaatggtttggagtttctgtaatttaaaagcgagctttttaggcatgaataacattaaaaaaatgaactccaaaacatacaattccacttcagtttgtacaactatcttctcaaaaggagttaaagaaatcttatcaccatttagcaaaagaattaaaaacataataagtatgggtatagaagtatatgcaaaaactcccccataaaagattcttatataatccggacttaatcgatttctattttcaatttcaaaaagacccatatcttcttctcttatattccacattcagttttttcaccttctatatagtttaaataattctcatacacttaaattctatttcacccttatttacttttcgttttgaattttttattttgttttcgagttctcccacgcattctctcattttcttcccaagtcatattaaatgatttaaatttgaatctacagtacaccaatagctggaattctgctgcaccaacggctactgtatatagtaaaacagtacctattacatatccaataaaagtatcaaacgtataatcattatgaaaataaatcaaaataagtaggattaatgcgtatattgaagccactttcatcatagtctcttttgttttactaaaaaaggaagaggatctttcattcatactaaatgcaccttcacttgcctgtttaaacgtatcaatcgttgtcacaatatgaacaatcactgctcctaaaaataagaaacctacatatactaatgtaattccgtcgattgtataatcagacattccaggaagaatcagagctgtgaataatattgtacctaattgaaatgcatataataatacgacaatcgtttggaactcttgaaatttaaatcgagcttttggaaatgaatatagaattaaaaaaattatttgcaagctatatagcacaagttcaattttaacaattgttttctcaaataaactagtatagtagtcccaaccaaaggttactaaagtaccaataagaaaaaacatcataactgaaacgtacactattgttcctatcataaaacctaaagcaccctcaggacttaaacggctgctacatgttactcgaaatccatctaaatcttcttcttttatgttccacattcagtttttcaccttctatacagtttaaataattttcattcactaaaatcccattacattcctaatttttcaagtacattcatctttgtgtaactaaatttagataatcttttatgtatatcatcactacattaattaccgtacataatcagaatgcttttgatagttcaaatagccttctttctcctcaaaagctctaaatattcttctctctttcacttaagcatattcctcatactctatttttgtttcccccgaaactgcactcacttagtaaaaacgttactgtcatcacaattgtatcgagataatatagctttaattttatcttcagaaaggtgataacctcccatcaacaatatgctaggaggttattacagttatttaaaatttgttttttattttaatggattcgatttttgcaaataataatgttatttaatttgagagaagcgaatactaaaaacatactgcttaataactcgtaattaagtcttcaccctcatatctagggtctttctcaactttaccatcttttgttttgatgacttttagtctacctaaccactctgctccgttatatgtctcttcacttacccatacattatgctttttaccatctacctcaactactagtgtggggtgtgtaaatataaattcctcctctacgtgcctacctacaatttctgcatttaacgatgtaccttcttcaactagtttactattttgatacccttcgataataggtaatccaataaatacaaagaatatgagtccaaatacgattactttcttctttgtactccatttattcttttctttcaattccttctgtctcgcttctctttcttcgcgttcatccaaactctcatttaaagcatcttcccatgccttaatttccgcttcgatttctgcttcagctcttgctagtttttctaattgttcatcggttgctaccatctcatatgacttatctccaaccaaacgaatttcagcaccattttcttttacttttcgcaagtctttttctgtacaattaaactctcgaatgatttccccttgtgtgtttaccagtctaacgtaaatgctttttttctccttcttcttaaacatctgaactcccccttatttgtttcctatcatagataaccctattgcaattaagataaagaaaacgataataaggaaagtcttccctttgcttacttgtgttgtagaaccttccaagacagcccatataaaatttggaaaagaagaatacctaggagaatataaaccaacttgttgctactcttctttagtggttattcttctactatcggttttatctgaactgcttcttttcttatttgtttcggtttctttttcttgcgtctatgattcattcaactgactccttttagaataactttttcctaactataaaaataccgaaatatcccattttcatcatataggataaaatgatttatttcttcacaaatagatttccaccataaaaaacagtctatgactattatttacaaatgttatttcaacttttattttattctttttctattcgctataaattcttgacgttctttttcatgttgttcccacgtaatactagatatttagattcttattcaatcaaaaatagactttcctctttccatgttggaagaggaaagtctatttatttctaaatatattatagcccttgttttattaataattgttacttattattttcagccttgttctttatcgtttttacaaattcatttcgccatattttaaaattatgagcaaattttccttcaatagaatttttatacccttcaaatttcacttctaaaatatcaaagtcattgaataatttatatgtctctgccgtcaaacctactgggtgtaataccccaccataatcatagaaagtgtcttcatcgagaagtattcctcttgtagtaattacatactctacatctttttcttcctcagtactcaacctcactacacttcctaaaggcaaaactttctccatataatctttcatattaattcaccgatccttttaatacgataattttctcttctattttttgtcgccttttttctaattggcggatacgatcaataaaagcatcacgtgttttaccttgcaaactattatcaatactactttctaatcttctaatatctcctgtcaaagatacagctgctttttcaagttgcataacaacgttaataatttgatctcgcccaccactgtccggaaatgtactatgaaccctcgacattatcatatgtaaatccatcctcatacccccttccttaacatttatcaataataagaaaccgaagctaactcttcatcttttgctatcatagaaattaccgcatctgttacatcttgacttaactcttttaaatcatttgaaagttcgttcacatctctggaaatctctactaataatgaacgatttaatcctctactaccatcattcataaaatagtttaataatgattggcgatggcttcttacataatctccagcaattgaagcaatatttgtatcaatttcaaagtcacctttaaatacatctaaaatatcttgaacaagagaagatgctacttcttttgcaattgctataatttcatcacgggataaataaagaatgatgcatcctactaaaaaatctacagctgcgttaaatactgattctaacacttcaagtaccttttccttacattttgctaatttattctctatccaatccacagccgcattcacctgatttctaacttcttgtataacttccttactaaatttcaaagctttttttcctgtttctacacctatacttgctatttttgttgctagagcactagtatctcccactactgttattgcaactagaattgcactgactggggttccatttaccactaaatccactacaacttcttctgttgtacttaatgttttttttccagtgattcctttatataggtccccagcagattctgatatttctaaaaaaccaaatttccaatcaaatcctgtttcgctaacctttttcaatttatctattgctacattcccattcctagaataaaattttggatcatataaaaaagaatgcccttccccattttccattttataaacctgtccaggtattacaaaatctgcggccttaatggcgccatacaaaggatcatattcatttataagactgcggcaatttttcatattggtcccgtatccgtacttaaccacatctttatttaaaacaggcgcaggatttaaagctaatacgtttatattatcttcttgatgtcttaatgcaactgtattcgctgctccgccacctaaggagtgccctagtaaagttatcttctttcctttattcttcgccttgactttttcataaaatttttctgcttgactatactgaaattccgctaatgaccccaatataggtgaattagttaaattatgtagcccaattgctccatcggttgctaaatcacctatttggctcggttgggttccaacgtatacaatgaaaatttcatgcgtgtttctatcctctaaagcatatgccccaaatccagttactgaatgaatatcatcagaagctataagattagcattaaagttgtcttgtaacttctgtttatttattattggatcagaattattatattttttttcttgtgcattataatcataaatatcttttgccgataatcttaattttcctacatcactacttaatttataatcttcctcattcaccatattctcccccttatatattaatggctttctttaaatttcttttcatattgtaagtaatctttttttgatttccgattattttcttctttattatgtaaatatgttgttatttcttgatcatgcctaatcatattattttcttcatttctttgtttatagcctatcgaaattgttatctctgttatttccatcggattttcctttgtatccttagcagaattaaattcaattagtagtgttgcataactaaacttctcatactctaatcctaaattcccattaaatatctctttaaattgaatttctgataaattatagcttatcgtagctggttggctgaagctttttttattcacatttggtttcaattcttttattccttgcactctattaagcattaattttatattagacatatctttccctcgatttgaagcttctagctgtccattttcgtatcttatatctgacttgaatacaacttcttctttatattgtgggttgtcactatgtttttcatcctcaactggagtattgactttcttttgtgcctcaccaaaaagaatattatctttaatactataaataccttgcgttgtttgataaactactcctatttgcttattattatcctcaataaaagtgctatccctaacctcttctttcacataagcatacccatcatcacttgcagacataacagtcttcatgtccccttcatccaatgcctttactaatctctcatactctatctttgtctccccaaaaccacatccacttaataaacttgccactattgacacgactatcatcaccttagctttcttctttaatttcatactgtcacctcgttagttactctaggcatttttagtttcattatgttccctttttgatagtaatacacttcatctttacctaatggcgcttcgttgcttatatattttatgttgaagatactttgatcatttaatggcattgcgataattgctgctgttagcttacttctcattttcataggtagagcttcacgatttcggtccatgtagtcgtggtgacctgctaatacaaagtaaatgcctactgtacgagatagatcaattaaagttgctgcatcctccatttctaaataaacaaatttactaaactcttcaacatttgtcatgataatgagttgttttgtgaatgcaggaatttctctaccttcttgtcttgcttgcgctaattcaagagctcgttcgcgaattacttccatccaatacttcgcatgcatattgatttcattttcgtctacaatgtagtgcgtcacattatctttatattgaacgaaactatactctgctgtatccactaacgtcacactttcaaaataatctttattcaattgagataggatgctagatacaatttgttttctcatactatcatctacactataaatcattaaatgatcattccctgcaatatcatgagctacaacttctacgtttgcaaaatcaagccccattggaattcttgctgcttgtagggcttttgtaacctctttatttttacgataagtagcaatatcaataatttctggcatcattggaattgccttcggacgttctccatcccattctcggtccatatcatttgcttcttgttgtaataattgaatttgctgtaattcatcttctgctttcgtaggtaatgcaacctggaataatgtaggagattctagttttattaacgctcttcctgctgtttcttccacttttatatcagatctccctacaatactagctacttcactttgatcaatcatatatagacaagtttgaattttaatattattgtacaattgaattctaagtgcattttgtcgccctgcactaattaaggtatgaattcctaaacttgcaccatctcggacaatttgcataattagcatttcaaagctttcatagaacttcgcttcttttactgcatcataattgtcgatcgcaataataatatgtggtatttctttcccacttgccttttcatacatttcaatatttgcaacgtcatattcacttaataatcgtttacgatttttcatttcttgagttaatctttcaacaaactttaaacatttttcagattcatcaatcgtaatcgtatccgctacatgaggtaatccttttaaaggtagaagaccatttgttccaaggtccactaaatacacatgcaaatgctccggactatgctggcgagctacatccataatgactgattgtaagaatgttgattttccgtagcctggacttgagaagaccgctacgtgtccgtctttactaatatctaatgttaatggtgtttgtgattgtaattcaggctgatctagtagaccaactgttgcttgtaatggtttcttttctttcgtccatgcttctttgaactgaatagcgtgtaagtcttgtaaatatacgctttctggaagtggtggtaaccacggtctagctaacgcttcaatttcatttatttctgcgtaatcgtgaatgtagtcaataacagcatccagttcagatggtacgcttattacttctttactgctaccaagtccacttaagtcttcacttaatatttcatattgtcctagatcatttattgcatagattgttgcgtctaaatgttctttatcctctttgttttctacatagtctgctccgctccaagctgattggaatagttcataaatttcattattcccaacttgtaagtaagcacgtcctggtaatgtaatttcagcagcatctggtgtttttaaaatttcattactatctgatgtattttgcacttttaatgctagtttgaatttcgagttactccaaatttgatcatctacaacaccactcggtttttgcgtagctaatattaaatggattccgagcgaacgaccgatacgcgctgttgaaactaactctttcataaattctggttgttctgacttcagttccgcgaattcatcactaattaaaaatagatgcggcatcggttcacttactaagccttctttatacagtttttgatactgattaatatggtttacatcattttccccaaataagcgttgtcttttttgcaattcagctttaattgatgcgagcgctctcatactttgtgctccatctaagttcgtaattgttcctaataaatgcggtaagtttttgaataaattcgccattccgccgcctttatagtcaattagtaaaaaggctacttcgtacgggtggaaattgactgctagagataaaatatacgattgtataatttccgatttacctgaaccggttgtacctgctattaatccgtgtggtccgtgtgctttttcgtgtaagtttaagtttacgatatcttctttaccacgtaatccaagtggtacagctaaagatttatgcgctgcatttttctcccaacgacttgtgatattcagttcttttactttttcaacgccgtacatttctaaaaatgttacgctttctggaatactattttttaagttttgcaaatgatttaatggtgctaatgcccgtgaaatatcttctaaattgaaccctttcggtacgtgatttagtttaaattgacggttaacaagctctccttgctctaagatgatgttcccttgttttgcatctcttatatctattaccgttttcacatgctccggtaaactttgcataacatcttgtacaaatacaagtgatacacctaattgactcggatcatcattaaagaattccataacaacatggtctaatattagtttttcatctgtaatgagaacgacatagtgcggtgcaaagtacattttttcattagtagaacttttttcatctagttttaattttcgttctttcaatatttgatacaaactatttaacacttgatcacggctacgatcatggtatacaaatccacgtacatttatatcgcgaacacttccatgaggtaaccagcgcatccaatcccatttttctttttcttcttccggaaaaatagtaataaactgcaagtcataataactatggaataaagccgtttgtgcaactaataattgtaattgctctaacactaaagagcgttggccaatataaccgactggtccattcattaaatctgttacaactggtacatcttccaatgatagataacgctgtcttagttcacgtgctatatcgattaattcatctttcgtttgactaaattcttcttcattaaattgaatttcaaaactcgtattagcttgtcctgttccaacgctaaatgttaagaaatcatgatgtaacattgttttttcataaattctaggatttacttgaactgccatattacgtattacttctacatttggattgtgataatgtaatgcgtgacgctgtttttcactttctgcatgtaaatctttcgttttttgttttatatactctctatagcttttatctcgttcaacaatgtcgactttatattgcttcaaatttttaatatacgatgtgacagaaacaatgattgttactaatgtcatcgcaatcgatgcgataataaacattccatatttcatgaaaatagcaagtaatacagttacgacaatcatgacaagtgaaggtgcaatgattcttgctaaatgctccgttggttttgatggcatacttgaaggctttgcaattgtcattttctcttctggttcacggtaaataatacgtggtgaacgatgatagtctggataaccactttgataattcgtttctgattctactaaaataggtaacgcagatttcactttatcttctgaagaaagtacttgaatgtcttcactaccaatctccaataaaataccatcaaaatataatacgtctcctgattccaacataacgctatcttttaacttcgtataattatgaaatacatccccgccatacacgttcactttaaaagaatcgtacaacgtttcgcgagatagcattaaatctacactagtcccggtaatagaaatatcatcgtaatcgttttgactcactgtaagagaatgtttcgttccaatatcaaacactttagttgtgccaacaatagatataaagattttcaagctcacatctcttgttttcccaatctcaatttccttattgaattctattaattgatcctgtaccatccaagcatttacttcattattccactttaactctacttcttgttctaaacttggattcgtaatatcatttgtccactcttttccaatcgacactattgattgctcatttggatgtaatgtgcacttatatattttgtctccataagtcaatactaatagttgctccatccgtgttcactgctccttttcaactgtctcatcaagtgcttactcttttttctctgtgtccgacaaatttttatcgtttgatgaattgccatatttctttttatattcatctaattgttgctcatatgtttttaacttttgatcacgttcttcccctgataaatccggattatttttcagtgattcaatttgtttaacaaggccgtacataataagctgaggatcatcaagtgtcttagctaaatctaatgatttatcaaaattaccttttccgttatacatccaatacagcaaatacttttcatcacttttcaaactaatgtttttcataatcgatttcttttgagcttcacctagtttttcagctgtaatgtatgcaaatgctaactcatatttagatgcaatcggtaatgattcaaactcctcttcattcaattgcgtaatgactttgtcataatcagttgctatgaaacttgcatttgcttctaacaatttattttgataaggaaattttataaaagtgaaatatattaaaggagcagctaaaataactgtcgccgctatgaaggaaaaagctaagtatttaaatgatttatagctttttttaggtactaactgcatatttttttctgtttttgtttgttccttctcaaagctgtcatcaagaaactgcagtaatgcatctaagctttccatttgagcaacggtctgttcaaatgttgtttcttttgcatcttttagtaacccagcatacaaatcatcaaagttatgtttttgggagaataaagcaataattagacacttatattgtgttaaaaattgctcttctaataatggggttggcggaacaatatctcgaattcctctatgtataatacttggtattaaattagcattaaaaactatattgtctggatgtaaaaagaacgtgattcgtttatttaaatatttacgaaactgcgcaacattccgaagtagtcttaatttctcatttcttccaaaacggctaagatcgtcccacttatataattttttatctacttgatatagaaacgtaaacatatcatccgtttcttctattgttaatagtacaaattcagatgattcgcccgtaattatatcgaattgacggaagtcttttatacgtgtttgagatttggtcatctccaatttccaattttctttttctatttgaaattgatagttcattgcatcaatttgaattattttttccgtcatgtttatcctcttctccttttctttataacccgtaataacttattttcaaataactaaaagtaaaaaatattctttataaaacttgcaaaatatctccatctgttatttggtgatcaattaaacgatcattatctgttaaaacaattgacttatttttcactttaattacaaaatgtgaaccttcatgattatcaatctttagcgtatctaataagttttttaataaatatttaatagattgatgattcggaatacgcaaatcatatgtatttccattccatttactaaaatctactgtcacattgatatgtgtttgtattgccatcactttacctccaacttttacgaagaaccgtataaataccgatgcaaataagtagaatgccgccgccaaataataatattattgttatactaattggctcttcattcattgtttcattactcgctacttcatctgcactttttctgacaatgtattcactgctaaataaactatttttcgtatctttaacactattattctcttttggttttgtaaaaagagaatctcgcaaagcttccatatctttttgttctttctttttctttttctcaatttcttcctctatatctttgttaaataactcaatcgatgctttatctaattctgtttccttatgttcctttttatttttttcttggtcgctttcttcaagtcgatccactttaaacttaatcttcccatcatcaccaagataactgtcagccgcgctccttatcggtagcgcgacaaacagtaaaaggatagagagaaatgataacttagccactatgctccattgtttgatcatttacttctttttcctcccatttcttatgccatacaaatagattactaaccaatccaataatggcaattacaaacaatacgacaaaaataactttcccagtatctttaccactaataaaatcatttagaaaactttctatatactgaagcggtgagaattgacgtatctttccgacagacgacatttgatctactttacttccaactgcctcagttaaaaataggtacatgcttaaaaatactaatagtataaacattcctaccatttttatttgtcgtaataagtaggttgagaccaatacaaacgccatcataataaatgtgatgaacgcaatccatagtaaactttgatcctgaccgaactttaaaagacgcccagaaatgatacctatactaatcccttccacaattgatataccgaaagctactactgtagttggtacattcatatcaattaatgagaatttctcttcaaaatgatctgattgcattcgtttcttttcttgattcgcaattgcgtatgctgtaaataatgcaacaatgaaacaagttaatacaattaagtacggtgtaaaagcattacctgctgcaattactccatcattttgcttttgaactggactagctaaaaagtcatatagcatctcattttgacgatctccaatacggctattcgctaaaattttcgtaaagtttttggagaatgatttatcatcttccattttcttcgtaaagtcatttaataatagatcagcttttgaaacaattgtcgttccgctgtcttgaatttcttttgcttgtccattaatttgatcaaatgttttatatacatcgtctgaagttgctaaactatgcttcgaactttcgaccaatgactgactttgcatcattaatgatttaataccagaatctaacgataaaatagctgtttgctcaccagcatgatttgttgttaatacttgctgctcttcaactagctttaagctattctcacgccatttcgctaaaccttttacatactctcctaaattttcattcatactagttgcttgttgcgtcgttccatttaatttctccgctagtagcatagaattttgatccgcactagtaatagattgttgataagagtttatttttttgttttaaacctgacatatcttgctttatttctgtagtaatacttgatgaaacaagatttgaaattaaatcaattaaactttgtttatttaatacgtagtacaaagattgatccgtcgcaattgcatctaaacttccctcttctaacttaggacctacatctttcgttcttaaatcaatcccataatacatttcgtaaaggctcattaaaccttgataactttcgactgtatctactgcttcttttattaatacactagatatattttttgttaatacttctgctttttgatgtactacttgattcgttgtactttcagtaactttaccgttatctgttcccgtttcgcctcctggatttcctccggttccgttgtctgttcccgttccgcctcctgggtttcctccggttccgttgtctgttcccgttccgcctcatttcaattaatggaaaaccgtagagtttctatccttaagttgatgggcatggggccatcatatcacttgtgaatatgtcgtctcttgttcacattttcctttttatgatgcaaatagctttttctttacgcgaatgtacgcagaacgctcctacgctcttgcaataaaagcaaaaacggattatccaggtggcatgtatttaagtattgatgatccaaagcgctccttacgctatataacaaacaatggagaaaaattaattttgattggcggagagagtcataaaacaggacaaggaataaatacgatgcttcattatgaagcactttattcttttgctgaagcaacttttggaatagacgaagttccttatagatggtcagcacaagatttaatcactctagataagcttccttatatcggacatattaacgaaagaaatccaaatatatttgttgcaactggatatcgcaaatggggcatgacaactggaactgctgccgctcacctactgaaggactccatcctaaaagtccacagtccctataaagaactgtatgcaccatcacgcttccatgcaaatccagatataaaaacgttcctctcccagaacattgatgttgcgaaacatttaattgaaggaaagattgaaaccgcattacgtaagccagaagatctcgaagttggtgaaggatctgtcgtacatgttaacggtaaacgagcaggtgcttataaggacaaagaaggaaaattacatatcgtcgatacaacttgtacacatctcggctgtgaagttgaatggaataatggtgattgtacttgggattgtccttgccatggttctcgtttttcaattgagggagacgttcttgaaggcccagcagatcaaccgttaaaacgcgttgataatgagtaaacaaataaagaagttcaacagaattacggttgaacttctttatttgttataaaacctgttcagataaatttcgacacaggaaggaaaatattaacattaaataaaataatatattcatctacaaattaaaaggggtgaatattatgcaacctttagctccacctcatctagaatctacagaaactatcttttcaagctctattacaaaacttgttgtttttatttgttggctagccattttagctgatggatatgatttaggtatttacggtgccgttctaccaaagctcctagaagacaaaagctgggcgctatcaccagcgcacgctggtacaattgcaagctatgctttatttgggatgtttattggggctattctagttggaacgattacagatctaattgggcgtaaatggacgcttatatgctgtttagcacttttttctatcacaatgggtttagcggctatcgcttcttctcctgagttatttggattatctcgatttataggaggaatcggattaggcggtgttatcccaacggcttcagcacttactgttgaatattcaccaaaaaaaaggcaatcttttatttatgctcttatgtttactggctatcctttaggtatcgtattaggtgctattttgtctatgtttatgttagaagatttcggatggagaattatgtttggtatcggaatgattccactactcctcattcctttcattattcgctatttacctgagtccattcaatttttattatcacgtaatcgccaagaagaagtgaaccaaattcttaatcgttttcaaattgaatttcatgtaaaaaataaaactcatcaagctccatctactatacgaaagaaaaatggattttttactttattctcaaaagaatacataaaagcaacactacttttttggatcacttatataatgggaatgtttttaatatacggtttaaatacttggttaccacagatgatgcgccaggcgggatatcctcttggatctagtctgtcttttctacttatgctaaatattaccgcagctgttggtgcgttattcgctggagcaattgctgatcgtataggcgcaaaaattgttattagcatctcttatcttatggcagccatatgtatcggactattaacaatcaagccatctgttacaatcatttatcttttaattggccttgctggtattggatcggtcggtattactcaaatattaaatgcatatgtaacacaatacttcccatcacatatccgagctacctccttaggctggggactgggacttggccgagttggtgcaattgctggccctattctcgtcggtattattatgacaatacaatatgacttagcatggaatttttacttattctcctttgcaggtcttatcgcagctatatctgttttcttcattcctacaaaataaaaagagcacaaacttacttgtgctctttttcatatgcttcaaacagcatgtctcgaaatagtgtatttaaaatttcaatatcgatccctgatcccttttcaattccttttacatattgcccatagtaatgaatttgttcttctaaaaattgatttagcaccttaattttcaatccaacatctaattcagtacctgcttttttctttattaacaacttttcaatctcatctaatacactacgttctaatggtaattctgtaatcaatcgatcaaattctacaggtggtaaagttgctttctcttctagccacttacaagctaaaataggacgtaatacataaaagtactttttcagctttacattctcaccttgcaaaaattcacgataatttttcgacgccatatgtaaataatgatatatcgttgcttttggatcaaaattcttctcactcatctgttgaagtagttctggaaaattagagtttttcgaataaaaaattggtgatcgaatccactcaagtaaagctgggttcgacttcgcgaatagttgcaacgcctttttaatatcccaaccacttatatctaaatcatcactaattggatattcaattacatctcgtttgtcatgaattgataaataccattctaccggatgtatataaacaaacctaacatcataatcgctatctttcgatggaaacccccaagcacgactccctgattccaccgcaaacaaaattttcacatcattctctttttcaattctttctaactccaactcgattttctctctcatttcataacatctccattttttgattatttccttggaaattcgacaatacactattaattttactacatactaaaaaaactgtcagaaattactgacagcctaataaaacttctattgttgcttttcaattacagtagcagcaattcgttcaaactctttttgaatctcctctttatatgcatctactattgaaaaatccatagcagcaatataaattcgttctaatttatcacgaaccgattttgctttcgctaagaaagacattgcctcattcatttttgctttatactgaatggaaacatcacgaatttccttcgcatatttctcatcagtccctggcgtaacaataagggcatacatatcaataatttcatcaccctcacgacttggaaaatattcatgcggtgcggtgctatcaaaaattgcaaagcctaattctcttacgataaccatatcaagactattcgggtcaaatccgcaatgatatacttcaacttcaaaccctttttcttcagctgccttagctaactttttaagcatcgttgattttccagaacctgggcgcccttttataaaataacgatgtggtaacccttctgttaaattaggaacaaaatcaactgctcctttcggtgtagcagctcctaaaaaacgatgttttacaagcgattttctcccgcttttatctgcaaataatttctggattagctgatcggttagttcatttgctttattaaaatctatattatcaatatatatcttctcccactcatcatgtataagcaatgcctctttaaaacgtgcgtaagcagactgaaaagctttacttgcttctgaaacaaatctttcaatttctaacttctgcttccttaatttatctgagtcccaagcaattcctaaatttatatactcttcaacaactcctggcattttgggctcaattacatgtggtgatgtcccatcaacaattcctacttttaattttgggataattacaccatcaaccgatttattgtcagaagaacaatgtaaaaattcaatatcatatcctttttcaacccattcacgaccgatggcctttattaaagaagatttccccgttcctggaccaccctttaagataaataatctgtctaacccttttaaattctcttcatataaattatgaaatcccctagctgtattaccaccagcataataattcaatacatttcctgtcactgcactcactccttcgcagcattgtatttacataagctacaatatgcgcgtagctttatttgggtgaatacctattttgtattgcacgcaaaaaggaaatgaattacaatttaactatcggaaaattccgatttcaaaattaaatacttctttatcaagagaggcagagggaccggccctttgaagcccagcaacctcagtttatacgaactgaataggtgctaattcctgcaaaatgcattgcattttggaagataaaactcaactagcatgtaaagctcacctttcttgatattgaagggtgagctttttattatttgaaaaacatatattggaggtatgtaaaatgaaagtaattgatttatcgcaaacatttgaaaataatatgtctcaatttcctggaacacctaaaatacaactagaagctgttacaagtgttgaagaatcaggctatcaagttacagattttcattctgtcgttcatgttggcacgcattgtgatgctcctgcgcattttatttcaggcgcaacgaccatcgatcaattacccctaaatcaatttgtaggcgaagcggttcttattgatgtaactcatgtacaagaacgaaaactacctaaagaagtactggacgatgccgatataaaagaaggagatattgttattttccattccaatctatctactaaatggaatacagaggcgtatgagaaagaagctttttatctttctgaagaattagccgaggaactagtacaattaaaagtaaaatctgtcggtttagattttatttctcctgatgaggtaacgacagaaacatcaccaattcatcacatactacttgggaataatatttatttaatcgaaaacttaacaaacttagatgccattcacacgaaacgtttcttcttctcagcagcacctttaaaaattaaagatagcgacggtgcttttgcaagagcatttgctgtaattttttaaacaaactatacaaaaaagcaaagatcatcattgacctttgcttctattttttttatttaaattaagaaagaattgctcaacatgaggacgtaaccaagctaaataatccttctctttcttctttgtacaagctatttcttccccatctaccatttcaacaagttctagttctaacagttgcttcgtgaatgctaacatattcacttcttcggatggatactcttcttttaatttctcctcaatttcccccaataaaaaaccgtcacgcatcattgccaatgcatcaatccaaagtggcggcatttcatatttttctcctgtaattgtgtcttttacagtataattcttttgctcttttcgaaattgaatcgtgtgtaaacatacagtcgaatttaatgttaattccatcataccacctctttcataatatctgcatagaaaaaaggatgcgcgtgcaccccttcttatcttttcataacactactgaaccgttacatgagcaatcaatctcatgtcgatattttccttcattataaacgaagtattttataaaaaaaacccttcttgaaacattttataaaatgtttatatttacacaacaagaacacttttctgaaaaatcttttctcaaatacattaaacggtcggcagaaaaatttctactttcgttcctactcctacactactttggatcgtgatactcccttgatgttccttaataattttatatgtaatcattaatccaagtcctgtaccattctcctttgttgtgtaaaaagccttgccgattttttctaacttctcattctctataccaaatccttggtcttcaacagaaatacacaaatatccttgcgttttttgatatgcacggatatgaatttctccaccctctggcattgattctattccatttttaatgatatttaataacacttgttttaattgcttatcatcaccgtttatagccggtaaattcccatctacttgtaaatgacatttaactctatattgcgttgcataactttccattagatgcacaacatatagaagggtgtctcgtatattacacctttcataatttgttggctttggtttccctaacaacatcaattcactaacaaatccattaaccctttcaatttcttgtagcataatgtcgtagctcatcgtatcagttggatttctttctttttgcatttgcgtaaacccttttaacgctgttaatggatttcgaatttcatgggcaattgttgtagacatagtcccaatcacagctaaattttccgtctctttcatattgttcatcatttcaaccactgttcttacataagattgaaatcgttttaataaagaatgtgaaataatgaaataaaatacacataaaacaagtggaattatcacttttaaatcttgtaatagcaatgtgaaaaatacgtactttccaattacactaaaggaaactaaataaaagtattttctattcacgaaaactggggcaaataaaattaacaacatttctaccatactaccatgttcaaaaggtctatccgttcgcaaataaatcattaaattattaacaagattgataaacatgtatccaaataaaaataaatattttacagaatatacataccctcttttttgaagatatatagaaataggaaataatgctattacaaatataggcacacctatcccaagactaccttctggccaccctaccgctgttccactaatattcatagcaggatatacaaaataatatatagcgtcatataaaaagaatataatataaaataataatataaatacctttaaggctcttctttcttcataaatcaagctcttgtatttgttcatataaaaactccccttgatcgatacaaaaaactttcattgttatctccttaaagtataagtatgaaattgctttcagggcaatatttaaacttataatactaaaaggaaggagatctctccttccttttagtaacaacttatatccaccttaccctatcatgtaacaatccatcagtaaaattattatgccctattacaaaatccttcatatataaatttaaatactcaccgtacttactttctgtatttaataacaactcctcgacgtaataagcaccttgttcaaattgatctaaaagtaaactagacaagcccgcataaattccgcaccctacctgaaaatacgttgcattcgttttatatttacgaaaaacttggctactattcattacattatacatatatgtctcactattttcataaacgagtaacacaccgaccaagtcctctccagcaacctcttcttccgctggattaaacactttacgattccagttccataaatcttctacttgatctaagttctgtctaattatatttgttgtatactcattaattcggtaaagaaaaccaacttccatattgaagtttttccctaaaattaatacttcctcatgtagcattaagcaaccatataattctttttctcctaacttcactttatactctgaagcatatacatcttcataaaagtaaagaggacgatgataactcatatacatcggataactccagatcgcttcatctaaaaatcgctctactgcccatgaagcataaagtgtatgtggctttataagtgccgtatcattcaaaaatgatgtgtcatgttctacaatataacatgctcttggcctttcatttggtcgttccttcataagctcaacaaccatccattgaacaacacctggattcatacctgaacctataatcgcttttgtatttgtaaatttctctttctccttctcaaaccttgtatatctttccgtaagctgaaagccgattaagctgtcgtcctgatctactgcttcattttccaaggctgaattaatataacaaattcctagttcattacaacagcttaatactctaattgtatctgcccctgaaacatcaatcacaacactcgttcttttttcttttaaatgttttttaaattccactacattttgaaggtttatttcatataaatataattgatctttcaaattcgaaaacagctcatcataataagtcctatctttttgttttatatccaccaaatgaaatttggcattctttaatactttataaattggatctttttcatttactatcgcttgatttaaaattgctaaaactgcttttgctgctccaccagcactaccaagcaatgtaattgataacgaattcggaaactgctccacaaacaaaacccctttaataaattagttgagcagctcctcctcaaaaaataaattgaatacataataagatagctcgtacacaatttttataagttagtgcacagttaccttttaaaaaatcacactataatatgtttatattcaattcattttcccctcatatccaaattagactaaaacaaataggctcgaccttttcttctccggataaaagaaaaagccagccctttcaactaatctacggacaatggacggattttacatgttgaatattcacatacatttttgcatcacgtgcttttgatatttcaatatgaccttcatcaattttcgccatttttccaattttattggactcctcacctaaatcgaacaccataattttcccagccattttaataagctgttcttcaaacgttctagctaacgtaatatttaacggatttacggggagttcatttttattgagggcatacggtacttggttttctttatacggaattaaccattttaaatgctttaaagatatatataccgttttataaaccggactataaaaaacaatatagtcgttcatcacacttgtaacataaccatgtattggagcatttcctgctacataaacttctgtaaaaatccctttagaagtacttaatacttttctcaaagaaattgaaggggattccctcttaattacagaatcaacatctggttttagtatgtcttcgtcatgtgctcttaaaaatttatagtattgtacatgatataaagatatatatacatagtcttgtccattgtaaagaacaataatgtcatttcctacgtctattaatatacctttaaaccttttttcaccgattaatttaacatatatattttccccaatacttttgtttaactcattcatctatatcctccttcctatgaatttcagctttactatcttccatttcaaaaaaataatcagggcaatgttctgtcttaatagtaagtaattccttttcatactatcgaaataagaaattgttcttctctttccctcataatgcccctcttatttattaaacattattcatcttcattctttttacatttcactacttgactcacactcttaatatgataattaatgatataaataacttcatcaccgtttactagcgtaatacattcttcatgcacttcacttaataggccttctacacactctgggccgccacgattaatctttacccacttatacttcaagtcacgtaatacatcgacgaaagtatcatcatcagagcagaaacatgaaacatagccatcgccacatttactttctttcactttcttaactagactcttcacatgtttcaattggtaatatactaattcaccaagaggaagttgtaatgtaaggtaatctcttcctaacgatacaagtacccccactcgactctctggtccacgaagatttacttttacagtctcaccgactaagcctttaatttgttcacagcataatatactttccaaatttgtatcctcctttcttattatcttcctcttcttgactgtctttgtgcgcgagctcgacccgaatcatcactttcactattgctttcactgtcgctttcttcgctttctctacaagctactgcgacactcttaatatgagatactgcaactaatataacttcttcttttacaattagtgtcacaaattcacaagaaacatcttgtaaaataccttcaactttctctgggccaccacgattaattttcacccagcaatatttgaagctttgaagtaacttttcaaagtcatcttcacattcacattccaaccatctgcaatcatctgctttacaatctttcgcattttttgtaatacttttcagatgacgaatctgatagtaatagagctctcctttttcattctttaatacaaagtaatccgaacatacagcgactattgttcctttttgagattctggaccacccctgtttactctcacaaaagatccaattaagtctttcagaaaatcacaatgaaataaactcacgagaaaaccccttccattaatttataagcttttgcactgatagtatatgtatctgtacaggttacgttctctatgtttgtcctagctagaaaaaaatatgcttttaacatggtagactactacctatcaaaatttgaagaaaggctaagaactccttatgtttttgatatcttcaaacaaaaaatcccttatgaatatacatttctgcatatcttcataagggattttccatagtttaatcttcgtctttaacatccatatcttctggaattggttcgttcaatatttcttccactaattgcttatatttctccatttgttctaaatgtgtattaaattgttctttatttactaaatattgctctccatcgaatagcgcacgaattttcttttgctgaattaactcttcaatatacgattttggtaaattcaaatactccgcagtctcttctactgttatatacaatgcgttcattcctttattattttttcatctatactgtatcttactttactttatttttgtaaacaaataaaaaagattttgtaaatgcagttcaaaaagcaggtagatgcattccatatattgtatagtattatatagtaagaattttttaaatatagaatggtattacccatttacacaaaggagagttaacatatggctactcgtcacatcattacaatgttagaaaaaacactacaagttgaaacagaaaacacaatttctcatttaaatgtatctttatctgatcgttttctttctcaaagcacagcaatacatgaaaacaattgttatcatacaattggtgaatggtacaaaaatcatttcttattccaacaagatgatttcctttgggctaaatatgccttctatgacgcatattgtgaagccatcaaaaaacaaggtcatcttacaaaacgtgttcgccaaatattagaatcattagctcgaatgcatggaaaacaatatattgcttccatactaaatatgccatttcctaatgaacgcgctaaagggacagcgtaatttagccatgttctgcgtaagcaaaacatagctaaattgttttctaggatgctttaccaataaaaagttcatatcatacgaactgatgaaaccggtgtcattataatgatagaaaatatagtaaacaggaaaacccccacgtacatctctcatccatttgaatagagaaatacgtgggggtatacttgttccttattatttcattatctgcttaatcagttcgcgatttctcttcttaaatacttcattatgagaagaaaccattccgtactcacttgcatctggttggataaattgtttggctttattcacagcatttccagcatcttggaatgcacctgcaattaaatgtagtttcccttcgtgctttaaaatatctccagcagcatataatccatctactgaagactcactatttgcattacctgcaatataataattatctataattgcaacgtctaactcactattttctaataatgtaatgtcgcgttcatatccatgattaataataacttcatcaataggtaaatgagaaacctcacctgtttcatgatttgttaattctacatattcgattgcttcatgattatcaccagcaattaattttgtaatcgatgtattaaagaaacactccgctgagctgttcataagttgttttacttgtgcttcatgaccagataattcttcttttctataggttaaatacactttttccgcaattggttctaattcatttgcccaatcaacagcagaattgcctccaccggaaataataactgttttacctttgaaacgctttaaagatttaactgtataatttaaattcgatacttcaaatcgctcagcaccctcaatagataacttttgcggtttcaatataccacttcctgttgcgacgataactgtttttgaaaagtgttcttccccagtacttgtttttaatgtaaaagtaccatcttgattacgaataattgattccacttttgtatctaatacaacttctggcttaaatgttaacccttgctgtacaagttgttcaattaacttatcacctgtaactggtaatagtcctcctacatcccaaatcattttttccggatacacatgtatttttccacctaaatgtggttgaaattctattattttcgttttcatttctctgagtccactataaaaagctgaataaagccctgcaggtcctccgcctatcacggttacatcaaacaattcttctcgattcattcgtgctcactcctcagctactaatcattgattatcattctcaataaaatataacctgtttccgcaaaatttacaatcaaaattactattgacaatacacctatataaaattatattatttaaagaatcaatagtgataatcattatcattttgttaataattagcaaatttgagattacatcttctttcattactatggttattactatattataaaatctcatattcaagatttttaataaattattttgcattaccactactatttcaaaaagattacagttaaacaaattattgtatacacatatcatctatgttaaaggagaaagacgatgaaaaagttatttatttcactaacagtccttttcgttcttgttatgagcgcttgtagcaatagctctacagacaaaaaggacgatgcaaaaggtagcaaatcagaaacaattacataccaatctgaaaatggtaaagtagaagttcctgcaaatccaaaacgcgttgttgtattatcatcattcgctggtaacgtaatgtcattaggtgtaaatcttgttggggtagattcatggtctaaacaaaacccacgttttgatagcaaacttaaagatgttgctgaagtatcagatgaaaatgttgaaaaaatcgctgaactaaatccagatttaatcattggtttatcaaatattaaaaatgctgataagttaaagaaaatcgctcctactgtaacatacacttacggaaaagttgattacttaacacagcatttagaaatcggtaagttattaaacaaagaaaaagaagcaaaaacttgggttgatgacttcaaaaaacgtgcacaagacgctggtaaagaaattaaagcaaaaatcggtgaagatgcaacagtttctgttgtagaaaacttcaacaaacagctttatgtatacggcgaaaactggggccgtggaacagaaattctgtaccaagaaatgaaattaaaaatgcctgaaaaagtaaaagaaaaagcattaaaagaaggttactacgcattatctactgaggtattacctgagtttgctggtgattacttaatcgtaagtaaaaacaaagatactgataactcattccaggagacagaatcatataaaaacatcccagcagtaaaaaataatcgcgtatacgaagcaaacatgatggaattctatttcaacgatccacttacactagatttccaactagacttcttcaagaagagctttcttggtaaataatacaaacatgaggaattcttaaattaagaattcctcttcctttattctatgaacagaaaagatgtgaaacgaatgacaaaagatcacgacaatccacgttctatagcttttacatacaaactaattttgagcataattgcattctttcttatttttatggtggcaatggtattaggggctgccgatacttcaataaaagatgtatggttagcgctcacttcctctgctaaaggggacaaaatatctattattcgagaaattcgtttaccacgtgaagtagctgcaatttttgtaggagctggacttgctgtttctggagcaattatgcaaggattaacacgaaatccgcttgcagatcctggattactagggctatctggtggagcaaatgctgcacttgcactgacacttgctttcaacccttccatcagctatctttacttaacattagcttgctttatcggtgctgcaatcggtgcgattatggtatttggaattggtatggtgaaaaaaggcgggctgtcccctcttcgaattgtattagccggtgctgccgtttcagcatttctactcgcaatttcagaaggagtcggcatttacttcaaaatttcacaagaggtatcactttggactgctgggggcgtaattggaacaacttggggccaattaaaaattattattccagtcatttcaattagtatctttatcgctatcttactagcaaaaaaattgacagttcttagtttcagtgaagaagttgctattggactaggtcaaaaaattattgttattaaaaccattctatttatcattattatattacttgctggtgcgtctgtagctcttgtcggaaatatggcatttatcggcttaatggtacctcatatggtacgtccaattgtcgggccagactaccgatttgttataccaatgtcagcaattactggagcttcctttatgctacttgcagatacagtcggacgtactattaacgctccgtacgaaacaccagttgccgctattgtcgcaattgtagggctgccattcttcctattcgttgtacgtaaaggaggaaaaacattctcatgatgcaatctattctaagaaaacaacgtcttattatactcgctttactaatactaaccatcacaaccattgtagttggaatgggacttggttcagcatctttatcttatgatcggctactcccaacattaatgggacaagggacttttaaagaggagtttgttttatactctttacgactacctagaattgttattacattattagctggtatggctctcgctttatcaggtgctatcctacaaggaattacccgaaatgatttagcggaacctggtattctcggtatcaactctggagccggtgttgctgttgctattttctttttatactttccaatagatgtaggttcatttctttacttactacctgttgttggatttatcggcgcatttctgacagctgttctaatttatgtattttcttatagtaaatcaactggacttcagccaatccgactaacattaactggtattggtttttcatttgcactatctggaatgatgattgtccttatttcatccgctgatcgtatgaaagtggactttatcgccaaatggattgcaggaaatatttggggagatgactgggtcttcgttttagcaatgctcccatggttaatcgtattaattccgttcgttttctataaagcaaatcgattaaacattctagcattaaacgagccagtcgcaatcggcgttgggattgaaattgaaaaagaacgcagatacttattagtcgcagccgttgcgcttgcagctgcagctgtttccgtaacaggaggaattagttttgtcggactaatggctcctcatattgcaaaatctttagtaggtccaagacatcaaattttcatgcctatcgcccttttaatcggcggatggctattgttattagcagacacaatcggacgtaatatcgtcgatcctaacggtattccagctggtattgtcgttgctttaattggtgctccttactttatgtatttattgcttaaaaaggcgtaagaaacaccctcaagattttttcttgagggtgttttttatttcattctactgttgcccatacccttcaaacttcttcgccaaattctccatctcatcttctggcaatagctttggttccccaatgcttttcgtttgataataaatttgagcacaaaactcaatctcttctgcaacagtaaatgccatttttatattatttgcaccagcaattaaaccgtgatttgcaagtagcacagcacgacgatcaatcatgccttcaaaagcagcatccgctaattgcttcgtaccaaatgtttcatacggcgcacagcggacattcggacctgcaaaagcaattaaatatgacacagccggaagctcccatcctaatgacgcaatcgtcttcgcgtaaggagaatgtgtatgcacaagcgcatttatatcttcacgcttcctatagtaaataaggtgcatatctaattcacttgatggttttctctctccttctattacttcaccatctaggtttaatataactacatcttcaggctttgtttcatagtactctaaaccacttgggctaatcgcaacaagaccttgttcacgattaaagatactaatattaccacccgtcccctttgttaaaccactagaaatcattttctttccatacgctacaatttcttctctttctttttgtaataacatatacatccccctaagtatgaagcttatgatgactgacttttatatttatctacttattgaaatatcttttttaaattctccgtaaacggtgcccttacaatccctttttctgtaataatcgctgttacattttcatgtggagtaacatcaaatgctggattatatactttactttctttcggagcagaatattgtccgaagcgattaatcacttcagaagcatctctttcctcgatgggaatttcttttcctgtcggtgtttttaagtcgattgtcggcgttggcgctgctacataaaacggaatgttgtagtatttcgctaaaatagatacgcctaatgttccaattttatttgctatatcaccgttcgctgccacacggtcgcatccaacaattacagcgtcaatcttcccttgtgacatgaccatagccgccatattatccgtaatgacagtaacatcaattcccgctcgctgtagttctaatgccgttaacgttgacccttgtaatcttggacgtgtttcatccgaaaagatttttaagtcccatcctttttctttcgctaagtacattggagccgtcgcagtaccatacttagtcgtcgctaacgcaccagcattacaatgtgttaatactcccattccatcatggaataatgttaatgcatgttctccaatttgacggtttatttcttcatcttctctatgaatttcttttgcctcttctagtaatctatctttcaactgtgagattgataaatgaatattatctgccgctacactttccattctttcaagtgcccaaaataaatttactgcagtcggtcttgatgtcgccaagtatgtacatacctttcttacttcatccataaatccttcttccgtactttcagcaaattcctttacccctaaatacactccataagctgctgaaacaccaatcactggtgcacctcgtactttcattacttgaatggcatcccacacactttcagctgttttaaatgattcatagacaatttcattcggtaataacgtttgatctaacaaaactaaagcatcatctttccactgaattggtattaattgctcttccatcatattctccccttactccgcgtagtgcattgactgttcttttaacgtttctacaaaacttctacctgttctatattgattcgctcgtaaaataaaactcttcgctactttaagacaaatttgctccgctctagcacgtgcttcctcattctcaatacaagtaatatcttttactttcgctaatccaacaatacggcggattaattcaagacctgtcactgcagctgtatcctctaatacagattgtaaatatacttcgttaaagccttcttccttcgccataatctcggtcacatgaatatcccaagcatctaaaaacttcttcttaaataaatcaattacctctaccatcgtagtttgtaaccaatccatatacgtatctttctcagctccaggtggcatcgttgcatctgcattcacccaagcaaacattaaattcgccattacattcccaacgtcatatcccataggtccataaaaagcaaactcaggatcaataacctttgtagaatcatctcttacaaaaacagaaccagtatgtaaatcaccatgaagcaatgcctgtgcattcgtcataaaagaaaatttacgtttcgctacttccatacgaagctctttatcactataaatatgctccctaatccatccctcatttaaaggaaataactcattacgcttattatgatttgtaaatggttctgaatatacgaggtcctctgtaatctcacataattcaggatttatataattcttcacaagttccttcttctctttatgattcattacaacatcagatgttaataaaagtgtatttaccataaaagtagttaagtcgtcagcaagctgcggaaatatttgatgatttataagtgctgtacgtaatattgtgtgattcgataaatcttccattacgcaacagttcatcacactatcaaataaatacaccttaggaacaagtccaggtgctaactcattctctaactgcaaaacatctgattctatacgaatacgattcgtcgataacttaaactcatctgaaatgcgagctgtatccccagcttgctttacgatgacagacatgttctcttttttatcccaaacgcggaacacataatttaaattgccatcacctatttctttacactttagcccctttgcatgttcaaacttagataatttctctttcacatatgcaatcacatcgctagcttccattaaaaaatactttgtgaacttagacatggtttcccctccacaccaattgtaagcgttttctaaaagctataaaaaataataggttgaattttttcatcctataaatatgtattcttctttttgaaaggtatatctaggttttattatatcttgttagcactttgagtcaatgtttctaactatcagcgtaatatacttcctaattatatatttgagatgacaaaaattgttcaaaaagatttcgattcattttattttatttatcgcacaattctttgtaaaatagaaataagcagttccttttcaaatacataacttctaagaaatatttccttcctaagaatttacacttacaccatatttctaacatacacactactctttcaaacaatcattgaaaatttataaacttaaagttacctttccattccctgttagccttaattgagaataaatattaattaaattggtataaagttggtttattctcttgacaaaataaccacttctatatgataattaatatcgaattagaattattatagttaattaaaaaatatattttatgagcacactattttttgatgctcaaaaccaacatttaggaggaattttaatatgttattaatcggcacagaagtaaaaccgtttaaagctaatgcttaccataatggagaatttatccaagttactgacgaaagtttaaaaggaaaatggagtgtagtttgtttctacccagctgacttcacattcgtttgcccaactgaacttgaagacttacaaaaccaatacgcaactctaaaagacttaggcgttgaagtatactctgtatctacagacactcacttcactcacaaagcatggcatgatagctcagaaactatcggcaaaatcgagtacatcatgattggtgacccaactcgcacaatcactacaaacttcaacgttttaatggaagaagaaggtcttgctgctcgtggtacattcatcatcgatccagacggcgttatccaatctatggaaatcaatgctgatggtatcggccgtgacgcaagcattcttgttaacaaaattaaagctgctcaatacgtacgtaacaacccaggtgaagtttgcccagctaaatggcaagagggttctgcaacacttaaaccaagccttgaccttgtaggcaaaatctaaggagttcgatcaaaatgatactagatgcagatataaaaacacaactatcccaataccttcaattaatggagaacgatattttacttaaggtaagcgcaggagacgataacgtatctaaagatatgttagctctagtagacgaattagctactatgtcatctaagattacagtagaaaaagttgaattagagagaacaccaagctttagcgtaaaccgccctggtgaagacactggtgtcgtattcgctggtattccattaggacacgaatttacatcattagtgttagctttactacaagtaagtggacgcgctccaaaagttgaacaaaaattaatcgatcaaattaaaaacattcaaggcgaatatcattttgaatcttatatcagcctaagttgtcataactgtcctgatgttgtacaagctcttaacgtaatgagcgttcttaaccctggtattacacatactatgattgatggcgctgcattcaaagaggaagtagaaagcaaagacatcatggcagtaccaactgtttacctaaacggcgaatctttcggaagcggtcgtatgacacttgaagaaattttagctaaaatgggtaacggtccagatgcatcagagctttctgataaagatccatacgatgttcttgttgttggtgggggccctgctggtgcaagtgcagcaatttacgcagcacgtaaaggcatccgcactggtatcgttgctgagcgcttcggtggtcaagtaatggatactatgggcattgagaacttcatcagcgtaaaaaagactgaaggtcctaagctagtagcaagccttgaagaacacgtaaaagaatacgacatcgatgtaatgaatctacaacgtgcgaaacgtttagagaaaaaagaacttattgaagtggaacttgaaaacggcgctattctgaaaagtaagagcgtaatcgtttctacaggtgctcgctggcgtaatgttggcgtaccaggtgaagctgagttcaaaaataaaggtgtagcatattgcccacactgtgacggtccattattcactggaaaagacgtagcagttatcggcggaggtaactctggtattgaagcagctatcgacttagcaggtatcgttaagcacgtaactgttcttgaattcatgccagaattaaaagctgatgctgtattacaagagcgtcttaacagcttaccaaacgtaactgttctgaaaaacgttcaaacgaaagaaatcactggtactgataaagtaaacggtatttcttacatcgatcgtgaaactgaagaagttcatcacgttgaattacaaggtgtattcgtacaaatcggtcttgtgccaaacacagactggttaggcgaaacagttgaacgcgttcgcggtgaaatcgtaacagacaagcacggcgctacaaacgtaccaggagtgtttgctgcaggtgactgtacaaataatccgtacaaacaaatcatcatctctatgggttcaggtgcaaacgcagctttaggtgcatttgattacttaatccgtaactaataaaaaacaggtgccttggcacctgtttttttattaccctaatgtataaactaaaaacctctcattcccattcttctcataagcacctggcaatctaacttctttcttcagctcaaacgcagtctgattttctaagaagaaaatatagtcctcagaaggataatataaaataatatccacttctctccccgtattttctactgaaagcaaaatgttatttactacattcataaacacttgcacagaaaacggattaaagaaataaaacctattatcatgtggatcaatcttatattcctgcgctaaacaacattggaattgaattttccccttactgtttcgtgcctttcgggcataacgatctcgattatccatcgcttctttataaaattcttcattcatttcaattccaactgctgaagccccacatttatgatgcatataaaagtttaatcgcccttttccgcacccaaagtctacaattcggtcgctacttcgtatttcatattgattcaataactcatctaacccgctatacggcgtcggttcgtagcggtgataatgcatagacttgttaaaccctttttgctcaccgactgtttttatatgtaaaactgcatcgtaatattgttcgttcattcgttttctcctattaaaaaatggtacttattattatacaccatgtactggaggctcatttttcatcaaattaataggtacgtgaaattatattaacgattttcttaatatatctatcgtaacttcaaatatatcaacgattttctcaatatatctatcataacttcaaatatatcaacgattttctcaatatatcgatttaccgacaattcacgacaaaaaaacaggagctctttagcccctgtcttctaacactttcaatacagtttgtttcaatatttctaccccatccataatacaactatgatcaaacctcatatacggatggtgtaatccaggttgtaggtctgctcctagtccaagcatgacagcttttaaatgtggtcttttcactgtatagtaatggaaatcatcgcttcctgtcgtatagagaggccctgtgcatctctcttccccatacacttcgagaatacctttacgcataaagcgctctgcttcttcggaaacctctgctcctggtgcaagatccatccattcgtatgaagttttcgaccccatcgatgcagctgattctattacatgctcaatctttttctttaattcttctaatagtatattactctcagctcttacatctaaactgaaatgaccatttcctggaatgatatttaaattatcaccacctgcttggcatctcgtcatttttactgaataggaactttgcggtggcagccaaatatttttcaaaccgatattaatcatggaaatgacatcaattgcattcacaccttggtgtggtcttgccccgtgtgcatcctccccatgaatcataccctctaaaaatcctgctgctccatggcgaatagatggggctgcttgtttcaaagatagttcttcaattggtcttagatggatgccaaataagaaatcagcatcatctacagcacctttctccaccatcttcaaagcaccattccccttctcttctgccggctgaaaaataaatctaaccataccacttttccatctcatatttttcaattgtaaaataagtcccattacaatggtcatatgagcatcatggccacatgaatggttcgctttaaattctccatttacttcttgccaaagtgcatccatatcagcacgaatcgcaataactggattcccgcctccaatctcagcaattacacctggacaatcatcaaatgttctatatgaaattccttcttcttttaaaaagtcagtaatatacgctgtcgtttcatattctttccaacttacttcagggttttcgtgtaaatgctgaaaaatctccgttaagcgctcttgtagttctaatgttttcaacgttccagtctccttcccacattacaaacgattcgggttaattatacttatgaaaaacagatgtttttatgaacatattgaattttaagaaaaaagtcaattgtttatttttaaatacttaaaaaccttactctgcacttatattacaaactaaacaaacaactagaacattccttattttctgttttttatgttgacgcttacataaacttttagttatcataacctaataaacgtctattttacgacaattctaaaaatacaaacaaacatacgtaacaaggaggaactttatgaaaaaagaaataccttttggaatagcgattatccctattatcattaccgttgcagttatgatggttacaattgttgtattaaaacaaacccctcacgttccacttattatcggtacaaccgttgcttctattgtcgcttggcgttatggttacaaatggaatgatcttgaagaagcaatgtataaagggattcgtcttgcattacctgctatcgtcattattattcttgttggcttaacaattggtgcttggattggcggtggaatcgtcgcaacgatgatttattacggtttaaaacttttaactccatcactatttttagtttccattaccgtcatttgttctatcgttgcattagcaattggtagctcttggtctacaatggggacaattggtgttgctggaatgggaattggcctaagtatgggaatcccagctccaatggttgctggtgccattatttcaggctcttattttggcgataaaatgtcaccgctttcagatacaactaacctagccgcaggattaacaaatacagatttattcgcacacattcgtcatatgttatttactacagttccaggtttaattattactcttatcgtctacgcggtcttaggaagaagcttcggcgctaacaatattgatgcgaagagcatcgatcaaacgttacaagtattgcaacaaaactttgttatctcacctttcctactcattatacccgtagtcgttatggtattggtcgctaaaaggtccctgctataccagcgattctcgtcggtattattttaggatttttatcacaagtctttattcaaggtggttctgtctcagcatctgtcggtgcactccaagctggatttgttatagacactggaaacaagctagtagacgaactatttaaccgcggtggcttagattcgatgatgaatacagtctcgatgacaattgtcgctatgactttcggaggagtattagaacatacaggtattcttcgctcaattgtaaatcagattttaaagttagcgaaatcagcaaaagggcttatcgcttctactatcgcatcttgttttgcaacaaaccttacttgctctgaacaatatatttcaattgttgtcccttcaagaatgtacgcaaatgcatacacagaaaaaggactacattcaaaaaacttatccagagcattagaagatggcggaacattaacttctgtcttcgttccttggaatacgtgcggtgtatttattctcgctacacttggcgtaggtgcatttgaatatgccccttatgctattttgaatttcatcgtacctattatctcaatcatttatggtataacaggcttcacaattgtaaaactatcagacattgaaaaagcagaactgctaaagaaacaaaaagctcaactagaagcttaaaaatagcggtaaattcagttcatatagtgcgcgaggtcgcccttgttgatagggcatttcctcgccgcaaatatgagcatacccgtaatcaactaatttctttaacaacctttctgtcgatcttcgagtcacttgtaagtactcagaaaggtcagctgctgtaaacttcaatgacggatgcgattgactaaattgaatgatttttgacaagttggccggactaagcttcgtttccttcgctattttcattagttccggattatcatttttcaaactttgtactctctgttctttcgggaacggaccaaacaaatctttatcacttgttagtatataaaaacaacgatctattggattattctttgcaaaactttgagcaatttttgcattttgctccgcctctttcacggtttttccataaccaaatccaatagctatcgttccttctacgctcgcaaacaagttatttatcgcatttgttttaataatcgattcgatatcaccacgagttgtatacaaaatacatgtcatttcatccacttgtttaaatgaaccacgtagttcttttgaaatgacatctagtttttcaagcaaactcgttcgtaattctagggaagaaataatacaagcaccaacagtagctgaatagctttttgctaactcagcttttatttttgcatcttttagaccatgtataatggattgtgttggatcaatcatgcgctctgaaggaacacctattttttgaagctcgtcgtaaacagcgtgaatactagttaaagctaaatgagcttctccagattgatatttagctacatgaaaatcgataactctatttatttcatctttactccacagcatattttcataatccaacacttgcgggctttcttttataccaatatcatggaacacatttgtaataaacgagcggtctactaaatcgatggaaatgttatgtggttgaatactttgatgatacatgatagaaagaattgaagatgcgacagttgtctcgtcttgctgtaagtatgtacttggaattcgtaattgttctcttatttcttttgccatataataaggtaaagcacctgagaaaaagatgacatcacaaggctttagacactttaataattcagaagattccgccggatgaaggtaaatatatggatcaatttctattccttctaatttttgagcaataggaaaaaggttctccataaactcctttgaaccgacaactgcaatttttatcatcattttctctaactccttatcattaattaacgactatttaacgtcaactatatcaaatgtacaaaactattgtaaacaggaaggggtttctattcaatgaaaattacagctattcatctttacgcaattcgtttaccgcttcgcaatccgtttgttattagttatggctcttattctgatatgccctctattatcgtcaaaatggaaacagatgaaggtattatcggttacggtgaaggcgttgctgatgatcacgtcacaggtgaatcatgggaaagtactttccatactttaaaacatacgctaacccctgctctaatcgggaaaaatccaatgaatatcgaaaaaatacacgacatgatggacaatacaatttacggtgttccaacagcgaaagctgcaattgatattgcttgttttgatataatgggcaaaaaactaaatcaacctgtatatcaattaattggcgggcgctatcatgaagaattccctgtcactcacgttttaagtattgccgatcctgaagatatggctgaagaagctgcttctatgattcaaaaaggttaccaatctttcaaaatgaaagttggtacgaatgtaaaagaagatgtgaaacgtattgaagctgtacgagaacgtgtaggaaatgacatcgctattcgcgttgatgtaaaccaaggctggaaaaatagcgcaaacacattaacagcactgcggtcattaggacatttaaacattgactggattgaacaacctgttatcgcggacgatattgatgccatggctcatattcgttctaagacagacctcccgcttatgattgatgaaggactaaaaagttctcgtgaaatgcgccaaattattaaattagaagctgctgataaagtgaatataaaactaatgaaatgcggtggcatacatccagctgtaaagctcgctcatcaagctgaaatggccggcattgaatgccaagtgggatcaatggtcgaatcatctgttgcctcttccgcaggattccatgtcgctttctcaaagaaaatcattacgagcgtagagctaacaggaccattaaaattcacgaaagacattggaaacttacattacgatgtaccattcattcgcttaaacgaaaagcccggactcggcattgaaataaacgaagatacactacaagaactaaccgtctttcaagacgttgtacgctaaaggaggactatcatatgacggttctatacgaaggaacattaaaacaaaataacgaatcatttcacgttacattactatcactagagcacatcgaacaaattttatcactacaaaacatcgtagttgaagcactagaagataaaagtcgtttacaaccactctcactagaagaatttcaatacattctagaaggaaacggcatgatgatcggtgcttttatcgaaaacaaactcatcgcatttcgcgctctactcgtccctcctatcgacgatgaacatttagggcttgatattggtctatcagaaagtgaactgcaccgcgtcatctatcaagaaatctcaaacgttcatccgaactgtcgaggaaatgggatgcaaaaaatattagcaaacgtcatcatggacgaattacaaaaagaagatagcaaatatgattatgtatgctgcaccgttgctccttttaacatcccgagtttgaaggataaatttgcgcaagggatggagattgctgcgctgaaggagaagtatggtggtagtctgcgatatgtttttgtgaagaaattgcgcggagataaagaaagcgattggacggatgttcaaagtattctaatgagtgatgctagtggacagcaggctttgctttcggaggggtatcgtgggtatgagatggcgaaagtggatggggattttgttgtgatgtttggacgctaacctatatactcgaaaagaggagatgtctgctgtgacctctccttttactttctcttcattgaacatatcgattgcaactccgaatatatcagcgattttcaaaatatatcggcgcaacttcaaatatatcagcgattttcgaaatatatcgacttaccgacaaagattgacaataattgcaacctatacaaagcgcaacattaaaccgtcatcttccaactagataaagctaaccagttctccatttccttataatcgggcatgattttcccgacaagacgccaaaacgatcgatcatgatttaaatgaaccatatgacacatttcatgaacaactacatagtcaattactcgctgtggtgccattgctagcttccaattgaatgttagttgtaaattcgaatcgcaagtaccccaagtacgactactatctgtaatacgaatagaacgtggttttgttttgaaattactttgatgcgctttaatactcttctctactaaagatttacactgcttatagtaaaatcgttttaaagcttgttgtattttctcatccttaagctctttcacataaatatgtaacttatcccctttaaatactgcgttgtcttgctcaatgcttgcatcttgggaaatctgtatcggatacgtattccctaaatacaaaaagccttctccttgatcataatccttttcctgtggtccatgcgctcgctcctgcatttctttacgtgttgtctgaatccacccccacttctcttctagcaactggactaagtattcaacaggtgtccctttcggagcctgtatttctacatttccatacgaatctacaaaaagacgcacggactttttcttcttataagttatatgaaaattaattgtctcacctaaatatgtatgtaccatttcatcacctagcatagtatttttacaaataaaaaagagtaggatacgaacgtcctactctacctattatatcatttactgctttaacgaactcattatcctctatactttacacctaatcccttaatgaaattccttgcgtatctatcgccgcactctttgtaatttttatgacctttttttcttaatagagcgcctaactctccttttgttaccgtaacgcctacgctatctaatatatcaagtacatcctcactcgttaaagatagtgcgattttcattttctttagaagaaggttattggcactctccttgctctgtacaggtgcaggctgccctggtttcggatcttgctttcctctttttaaagtaataaatccatttaaaaatgcctctaacatcatcatatcgcatgtttttacgtactcatcttcagctacctcatcattttcagcttcatgctgaggagctctctttatttttgtaagcatatcaactacgtcttctttcgttacttccatcccgccaagtttaaagatttctaccatatctatatcttttatatctaaagcgtatcgtactctttttaatatatcgttgttgctcattgccattgggtttcctcctgaaatgttgattatttattcagcggttaaagtttatgctataacctgctttaaattatcatgtttaatctaaccttttagttattgtccgctaaattaatactttaacattttaaagatatgttttatagtcttacccgaacttttctctatcattgtatctacagagctcttacatgttttttatatgcctataaaaagatttctctcttaacattaactaaaagaaaaaaacagtgctttgatttctcaaatacactgttcttttccagctctgcacttattttcaactcactcatgtcatgcactacatatgaaatgatttaactgcttaaaagttaaaccatctcactatcctgagccacaccaacactatcctcaaacttatccaacaaagcacgcacctcatcggtcgatttcgtactcatcaattgatttctcaattccgcagctcctgggaagcccttcacataaattttgaagaagcggtgaagtcctgtgattgagcgtggcagtacttctgcatattgatcttgaagatcaagttgtagtcttaaaagatctagatgttctttactgctatgttctcttggctctttttcaaacgcaaatggatttttgaagatgcctcgtccgatcattacgccatcaatgccgtatttttcagcaagttccagtcccattttacgatcaaggatgtctccattgattgttattaacgtattgggtgcaatgcggtcacgtaattttttgatttccggaattagttcccagtgcgcatctacttggctcatttcttctcttgtgcgtaaatgaatagaaaggtttgcaatatcttgtttgaaaatgtgcgttaaccaatcttcccactcgcttaactctttaaagccaagtcgtgtttttacgctgacaggcagtccacccgcttttgctgcttggataagttctgctgcaacgtctggacgtagaataaggccactcccttttcctcttgatgcaacgttcggtactgggcaacccatgttaatatcgatacctttaaaccctagttctgccataccgatactcatttgacggaagtattcaggattgtctccccaaatatgtgctaccatcggttgttcgtcttctgtaaaaattaaacggccacgtacacttttcataccttctggatggcaataactatccgagtttgtaaactctgtgaagaatacgtccggacgacctgcttcacttactacgtgacggaaaacaacgtctgtcacatcttccattggtgcaagtacgaaaaatggtcgtggtaattcacgccaaaaattatctatcatttcaaattcaaatcctctcactatgaatacaatttcaaaatctaaatttataatttgtgaaaatcagcaatatttattttaactaaaatcgcttatgaatggtatttttgtaaaccaaaaagcaggtggtatagattttttctatatcaactgctttcctattatactaacttaagccaagccacacactccacatgagtcgtataaagtatatcatatcttttggtatatcctatattactgtagtgcattcttttgcaaaaaaataaattaaaatgtcctcttgttatttcaaatgaatttaatttattttaagtgtgtggtcatctttgtggtcagtggtcaaaaaagagccgagttttatactttgctcttttttttaaaattttatctctcaccctctttaaaaagaacgtttgttcgtgtaaaataatgacatatcatacgaaattgagggatcatcatggaaaatcaaagttggggtacaccgaagattaaaggaagagggatggttttaacaatagtataatatatgagtagagataacgtatacaacgataggtagttctcttcttgatgttgcctaacttttttcaaaatgtcctttacaaagggtacagattaatgtgatgcatctctttttcttactacttattgttttcatttcctatatattcaatagtttcttttaatagctcttcaaagttaataggataatcatgatctaagtcaggcacaactttatacttatgttctatatttttctctcttaatagttgtacaaattgctgcgtggattcgaaacaatcttcatcttgattcccgcatactatatatccttttatatgtttatccttcagcactcttagcaactcatcccattcttcaatctcgggaagccatggtgccataaaaacaaaaccatctacatttatatcttgttgtaaaatcgtatataaagctactctcgcccctgcagaaaaaccaccaatgattacactttctactgtatgattttctataaacttattgtaatgctcttttaattcctctttccctctctctatgtcctcccaaacaaatccatctgaaaactcaatttgtgaagactgtggtaaagctaacatataatcttgtatcaaaacagatttccaatatggttctactatttgtatattttcttggttaccatgcaatgtaagtagtagatttccctctttcttactgtatatatatttcacatctggtctttcctttttatgtgctaattcttctctttctttacataattgcaccattgtatgaaattcttcaaatttatgtagtgattttaaatcttcatcggaaattaaatactcatttccataccagaatcccttttctataatggcctctctcattaaatgtaatgcttctttttcaagtcccgatgcacttgcgagtgcatacttaaaattatatatttgcgcctcattccctattacacctgtagcgttttccattatataattgtacgcttcaaaacttcctttatttgcataacaacgtaacgtttcatttaataattgaatgtaagtcatactatttttcatgtaccaattcccccgcaactttttataatatttattttgcgaatctttataccactttgtataacccacgctaacaataccttattctcaaaatgatgcttaatagttgctcttccctgtccaatacatttagtataaataagaatagactgaaaaatcaatattttaacaaacaaaaaaagacaacaatatatgtattgttgttttcattacgtctacccactcttttgtttttttctatctggtttacttgaaactaaataatgtttttctgaaatatataagtctctttttaagctacgatttaagtaaggtcctaatttcattccacatatgaggcgatcttcgctaccttcaacaattgggaacatttctttttctgttacgtattgatctactgctttttgtacgacatcaatttctttcactaggtttaaattttctgctgtatgttcaaatacctcaagcgtttccttcgttatgagaaaaacatttgttggaaatgcaggtaaatatggttttaacaaatcataatttactgtataatcatcatttactaatactgtataaacgatattagcattcgtttctaaaaactgagccatcgcttgttctaattcatctttcgtaatttcccgctcttcttttccagttctgaaaaagcgaaacatcgcatcgcctcctttttactatattatagcataaaagaaaactgaaaaatcataaaaaaacccattgaaataatttttcaatgggtttctatatatttatcgttattttaagaatgcacttagcatccatacatgctgttctaatgttgtatgaattgctaacagcatgtcagctgatgtttcatcgccagcttcacccgcaacttccataccttcttttaattcttgaataagtgcagaataatcattcactaatgtttgcaccatttcttctgcagattctttgcttgtcccttcactgacactagatgttgcgagatattctttcattgtcgctaatggtttaccttctaaagctaaaatacgttctgctaactcatcaatatacgttccagcctcattataaaactcttcaaatttctcatgtaatgtaaagaagtgtggccctgtcacataccagtgataattatgtaatttaacatataacacattccagtttgctacctgcttgtttaatacttcaacaacatttgttttcgtactcatacaatcactcctcttatcattttgtaatgtttatcttttaataacttaattacattttaccatacattccctttcctttcgaacaattggcttatatgtaacaaagttttaacacctttaatgcttccctaatatcatttaattcatgtattttttcaaccacttcatacgtctaattgtccaagctcatacatatgcataatagtacatcaagctcatcatagtagaaagagggataacatggacaatcaacaatggcaagtagcaaagaaagtagctgctacttatatcggaactgtcgttggagctggatttgctactggacgagaaattgttgaatttttcacagtgaatggattatacgggacaattggcatatgtgtaagtggatttttttttatttggcttggcacaaagatgatgttactttcatcacaaatcggggcattttcagcgcaagaatttaacaaatatttatttggggatgtatttgggaatgttgtaaacacattattattactcgttttattcggcgtaacgagcgttatgttatcaggggctggtgcagtatttgaagagcaacttcgcttaccaagacaactcggtattctcattacagttatcgcttgtctcattataagtagccgcgggttacaaggtgtttttgaagtaaatacacttgtcgtacctattatgatgatttttattatcggacttgctattacaaccttttttcacggtacacctcctattaataacactattcctgcagagagctggaatatgaaatggattactagccctattacatatgtcgccttaaacctttctctcgcccaaagtgttctcgtcccattagccagtgaagtaaaggatcgaaaagccattttttggggtgggattttaggtggtgctggactttctttaattttattatgcagccatttagcaatcttatcagtcgatcaattttatcaatataacatcccaatggctgaagtcataagaagatttaatgcaacttttcacttcttcttcgttctcattattttcggtgaagttttcacaactttagttggtaatgtgttcggaatgacaaaacagatgcaatctattactgggtggaaaaatcacaatattattttcttcattttactaattagttattgctttagttacatcggttacagtgacttacttcacattctatatcctatcatcggatgggtaagtattgttatacttccaatcattgcgtttaaacaacttcaaaaaacataaaaaagcatccatgttattggatgcttttttatgttcattcacaatcatcacatacttcccagtacggtcccatttctaatgctaaatacggctttaactgcaaccgaatcattcgactaggcatgcgttctaaaacaaattgaataccttcttcatcttcgtctaattcaacttttgaaatcgtaattttttgcatagtcgtaatgggaattccatctttatataaagtgattttcacctcatcgtattcattaaaatacaattcgacactcatttgatttttcagtatttcatcaccaattttaaatgtatcattttgttcttggattatatatttccatccgcctctatcttctttcggagctgtttgaaataatgtctccaaatcctcgtatagcataagataacccctctcttactaaaaaacgatgagtattttatataccctttatctctatcactatccatagctattgtaccatatatcaccgttcttaccgtattcatttgcttcatacacacttataaaataactaattctatctccattattatgtatattacctcattactccatacactcttacaagttcaaataacgacagactttaatccatgcaaatattgtctactctccgcttttattagctcacagcattcacacttttacatatagtaagactaccacaaataaaaaaggagagtgacttataccactccccttaaaagaacttccctatagctgctaaaactaatacgattattaaaattgcaaataataatgagacaatgaaactaaaaataggtaacgctttcttttcattcttcttaaatagtaactttaaactaagaaaaatatttactggtacaagtataaaataaaaatatttaacaatttgcaccgagctattcgaaagtgtttttaatataaacacttcaattagaaaaacaataaaaaatgaaatacttagccaaaatgagacgtaactaagccaagaatgtctttttgtcccccaatacactcccataatactctccttttatttgtattctataggttaataattatacacaaagctaacaaacacctctatttttcgacaaatattatgcaaaataccattttaaacgtcataaaggaagtttacatctccatttgattttacataataaaacagactaccctctagtgtcataatgctactagggggagtctgttctctattaaactttaaatctctcaattaatacttgcaattcttcagccatttgagatagcgtacccgccgctgatccaatttcctccatcgaagctagctgttcttcagctgaagccgcaacattttgtgtgcttgtcgcattattttgtgctgtcattgcaatttgtcctactgaaatagatacttcatttgccccttttgacattccattagccgtttcaaccatcgtcttaatttgattagctatttcatttgtagattgtaaaatttcagcaaaattttgcttcgtttcatttgcaataacaagtccagattgaacttcttcatttacatgattcattgatttgactgtcttacccatatcgtcttgtatttcgcctattaatttactaatttcactggaagatatgctagactgctctgccaatttacgtacttcatctgcaacaattgcaaaacctcttccatgttcaccagctcttgccgcttcaattgccgcatttaaagctagaagatttgtttgatctgcaatgttttgaattacttccaatatatcaccaatttgttttgatttattatttaataactgtataacagcatctgattgtgaaaccgattctgcaatagactgcatctggtttactgttcttcctactagtttcccaccatcttctgctttttcacgagtatgagcagaagcgatattaatagatgatgaactatttgctacatgctgaattccttccgttacatcaaacagtaacatagcaccattttctacacttgttgtttgcgtcgttgccccacttgatatttcatccattgctgttgtaatttgctcagttgcttcactcgcttgtcttacacttgcagttagttcttctgatgctgctgcaacatgtcctgccgaagtgttaatccttccaattaacgtccgtaatgaatttgtcatctcgttaaaacctttcgcaagttgaccaatttcatcattagaatgaatttcaattgtttgcgttaaatccccttcacttatttctttagaagtgataactagtctctttaaaggcttcgtaattgaaagtgtcacaaaataaataagtactccacctactactaacgaaataagcataacaattaacatattataaaatacaggttgagcagcttcaattacttcagttgcgtacatcgtcccaccaattttccaacctgtttttacgtttgtagcaaataccatattcttttcactaccaccataagaatatgtaaaagcaccatgattatcttcataaattttctttgcccaagaatcagctgctttatcccctgatttttcttgtggatgagcaatgattttttgctttccatctaaaatgaaggcatatccttttttaccaatattgattaactttgttgtttttaataaattgtctaaacttaaatctagcgcaacaaccccatttttatcttctgtttgttttgcaatcgttacgacaatatgtccatttccttttgccttatatggctcgctaacaacaataccaccttgttttgccactgcatctttataccaaggtcgtgttgttggatcataatctgctgccatttgtatatttggttcctgtacaaatttcttatcattaccggcaacatacacttgttcaacatctatatttaaattgatatactgagataatgtctttcttagctcatcctgattatccccttgatacatattcccttgaattactcgtgcaaagttattcacatcgttaaattttgcttcaatcatttgattgattaaattatctaatatttttatattatcgttagcactactcgtaatttgtgattcaaaattctttttagcagtttgataagacatgcccccgattatagaaacggctgcaattaaaattacaaagaatgaaattaatagcttttttgctactttcatatcacgaaacaaatttaatagtttacccattatgaacctcctaattttcaaatttaaaagttaaattgagttaattataaatatttcccattccttaattattattttcataacctattatggtgaatactttgtaaagtttaaacaattaatttccctttgtctatatatatgaataatattattataaaatttacaaatagaaaaaaccaaaggggcccctttggtttttacatttttttatgttgtttagaaattttcttccatttatcacgctctgctctggcaaggattgcatcttgtttcctcataaaatacgccagttctctttgtaattttttatagcttttcaaacgatctatcgtaataagtccgttttcaattgcactatacaccgcgcatcctggttcattctcatgcttacaatcacggaaacgacatgttgtcgcaagttcttcaatatcagagaatgctgtttgaatcgcttcgctgccttcccaaagttgcaattccctcatgccaggcgtatcaatcacgagagcgccactaggcaattggaataattctcgatgcgttgtcgtatgcctccccctactatcctcttcacgtatatctcccgtttttgctacatcaattcctattagagcatttaacaaagttgactttcctacccctgatgatccaactaaagcaattgttttccctgaagaaacgaattgtttcaacgaatctatacctgtatgctctaaactatcaacaacgaaaataggaacaccaattgctatagcttccgtttctacaattttctcttccacatcattacatatactactctttgttaaaacaataactggcatagcgccgctttcatacgctaataataaataacgttccatccttctaacattaaaatcatgattaagtgcattcactaaaaataaataatctacatttgctgctataatctgttcttctgttcttgttccagcctcttgtcttgagaaagagcttcttcgctggaaaatacgatgaataatcgctttcttttcatcttctattttctttatatacacccaatcaccaactgctggataatcgcctttcgtaatcgcttcatgccgaaacttcccagacagttctgccatatattcaccatcattacaaataatgcgatatatatgcttatgctcaagtaaaatacgacctacttcataatttttctctgtaacttgttcttcaaaaaatgaatcccagccgaaagattctaaaatattttgattcaaataaatatcctccctagtttgtactaagtggaaggattgcgaattaccttatataatatcgccctttccatccacctttgtatttggttgattattcatataagttattttcgccataatacatcaccccgttcttattttaattattctcattatatggaattctcctataaaaagctacattattttacgtaattttcaaataacttgtttttgagcattctaatttgtcctcgatgactaatttcatcttctagcacatgaaaccatagatagtgctggttatatgctacaccgttaggccactttctttctgacatgagccactcatcaccttgttcacttaaatacttcagagattcttctcgaacactttgtagaagttgtacataatactttatttcatgaccacggattgctctacccgcttcccctaaatacagtgcatcttcccatatttctaattcttcttttgtaaagtcacgatcttgaaatgaaataagctgatgaactttttcaatagctgctatatgctttaataaggcgccaattgaatttccgctgctttgcataattaaatctaattgctcaactgataaattttttacttcgcctaatgttacagctctcgtatgctcaagcaggcttactaattcccctatttttttgtataaccatctacacttcttattcgataatctatattcatatcacgcacccctttctgcattcatattattgtaaaaatgattcatataatagactgaaatctatctaaattttctgttataattaatttgaatacaaaatatacccaaacaaactttctcaatatgcttatatgaaatattaaaaggaatcaatatgaaataatcgaatcttattcactaaaaggagtggattcgatggaaatgtatcaatggctaaccgctgttctcgttggtggcattaccggcttcgtttcccatctaatcaataaccaaggtaagttattgcttccacgccgtttgaaaacattttttcattttggatttttaactgatatttttactggtagcctagccgcacttcttgggctcgttttattcgatgtcaccgcaataaaagaaattataaaagtatccattgtaactgctatttccggtcaaacttttttactacatcaagctcttggtggcgaacaggctaaaaatacgcaaattgggaaagctgatgagaagattcaagaaattgacaaattattgcgacgttagtgtatactttcttttaaaattattgttataatgagaaataaatattttctattgcgtcgtttgtcaggagaaagggtgtttcgtatgacaaaaaagaaaatagaagatttcttaacaaactccgaaaaagaggaactgctagaaaactataaatgtttacgagaagcccgcacaaaaagcgaagctaactattttggcgaagcagtaaaccatctattaaataaagcaaaacaacgaattattaaagatgcaggtatacatgatgaaaatgctgcaactgttcaatcaaagagaaaagcactgttttagctacattagctaaaacagtgctttttatttagaatttttttctttccatgctatattctctctgcctttatctttccatttttacagtttcaaaagtcatctagacctaaagatcaacctaataatattagcccacgcaaaccattttaataatagataaaataattgaactagtaatgctacaaactaaataagtttattaaatcgcttcttttaaatctgaatgcggatttggtccgtattgattgtcattttcttcactttcaatgataaaaaatacaagtaaaacaatgctaccaaacggtacaaaatttaatagttgccaccatcccgttttcccaatatcatgtaatcgtcgtgcaccaaccgaaaaacttggtataatcattactaacataaatagcaacgcaataatagcaactaacacctctgaaaatgatgataaaaataacagtagccaaaaaattacgatattggataaactaaaaatccagtactcttttcgcgtagctctaccactaaaattcccataattctttagagctttcaaataccattgcatttaaacctctcccttttatccccaataaaattaaaatatgtaattattaacagataagtagaaatataacacaacatttatgtaaaatccatatccccatctaaattgccctctatttaaatagttttttccttcggcatttttcacattactttcacatctatttcacaaatataagtagtccgatatgctaaactaagtatatccttttccaaggaactatatgccgatatataaatccctatctttatagggatttttattttttgattcctcataactttgttacaatacatttcttctactatctctatacttttagtaaccactttaattaaaagcacattcatgtattcacactcttattaattctgatttgcgaaatatttatacaagctttatgatgcaattcctgtttcactattttcagtaattttttcactttttctaaacaaaaataaagctcctatatatagtaacgcagtaaaactacctataagtataaaattgtgagatattgcaaataacattccagctattgccgcaccaatcatttgaccaatgtacatagaagcatttgcaagcgccgctcctgttcctcttgctacactagacatgttttgtaagtgcctcatcattaatacaaacaaaattcctgtcacaaaaaataaagcaaagaacaataactccaccaatacaatgttctttacatgaggaagtaatacatatagcactgctgtaaatataattccaccatagaaagaaaggttataaccaattttatttacgattctaggaccaaaaatattaccaattaaatttcctaatcctaatacgagcatagctgtacctacttcatgaacttgtaagccaaattgaatggaaagccatacaccaaaaaatgaaaatgcagcaaaatttccggtttgaaaaacaaagtatgcaaaataagaaagtgaaacctttgaatctgtaagtaattgtttataacgctgtaaaatcgcttttttatttccacctatatgaaccgactgtatttctggtaatacaacataaataagaatgacaagtagtgctgataatataccaatgaaatagaatggaattgtataatgtatcgttgctaaataagctcccagtggcagccctaaaatttgagagattgataaccctgctgttgcaacaccaattgctttcacaatttgcttcttctctataagaagcggaatagatgcccacacttgtggagatacaaaagctgcacttacacctgctaaaaatctaaatgttagcatccataaaaaactcggtgcaattccacaaaaaaacgtacttattgcaaaaaaactcatacctagtaccattactttttttctgtttaatccatctgatataggaccagccacaagcgcaaatccagcataccctaaagcatacgaactcaccatccatcctgacaactcagttgaaacatgatacacctgttgcaatgtcggcaacagtggtgaaattaagaaagtatctgtaccgatcataaacattatcataaaaaatacagctagtactctgttcatttagaccttctccttatataaacagagggtactctccctctgtttaactaatcttctaaaatagattggatttctttcatgactctttcattcaatgcaacatctaccgctttcacactttctcttacctgctctgcccgctttccaccaggtataacagtatcaatcccttctttatttaataaccatgctaacgctaaatgagacacttcaatatcattttctttagctagcccttttaacttattcactttcttaaaattactcttatatgtattttcttcaaatagatttacattttgacgccaatcgacttcatttaatttaaaatcttctgtatattttccgcctaatattccaaaagcaagaggcccatatggaataaatgaaatacccgcttctatacaatacggcaacagttcttcctcagctgtacgttctaacatattgtatggagattgtacaacatctatatgaccatgttgattcgcctcttttaattgttctatgtttacgttcgatattccaattgaacgaattttcccttcttcttttaaatgagtaagctctccgattgaatctatgtaacttgtttcaggatttgtaaagtgtaaataatataaatcaatatattcagtctgtaatcttcttaagctattttccacagcattccttaaataacttggttcattgttaatataagtttctccatttaacaacggttgaattccaccttttgtagcaagtataaactcatgacgttttccctttaatacttctcctactaattcctccgatctaccgaaaccatatgaatctgctgtatcaaaaaatgtaatcccttgctgaatagcttcttctactaatcgctttccttcttcttcattcacatcagcatataaattatgtccccctactgcatttgtacctaaacccaactttgaaatatttaatcctgccttttgcaattttatatacttcattttttctccccctatatttctattgttcgaatatattcgaacaatagaaatataccactttatatgttatagtgcaaatatcttaacttatacaagtaggtgaaatatgcgtacactctatcatccaaatcgagaagaaattcaattttcttctgtcttatatgcacttagcgatcaaattcgtttacaaattgtaaatatgttactagagaaaaatgaacaatcttgtggtgctttaaacatccctgttgcaaaatcaactttatctcaccatttcaaagttttacgtgagtcaggtgttatgtacacgcgccttgaaggaacacaacgtttcatttcaattcgtgaagaagatttaaatgctagattcccaggtttattacaagttgtattacatgcgacagagccatattaaaaaaacatctcatattcatatgagatgtttttttaatatggctattcttttaataaatctattaatccattcccttcagatgtacgttcgtaccctaaaggtacagttcttttaatgagttgtgcatatatttccggctccgataactttcgaccgtattctttctcacactgtttaatgagcaaggcgagcgctccagcaacatgcggcgtcgccatggaagttccacttagcacagcatattttccttctggatacgtagataatatttcatcacctggcgctactagatcaatttcttgatttgaattactaaaacatgcaatcttccgctctaaattaacggcaccaacttcaattacctcggagtacgcacccggaaagtctagttcctctgtttcatcatcgcaatctccattatttccagcagcacatacaacgagaacatcctgctttaccgcattttgaattgcttcatgtaattctggaacatcttgcggaccaccaagtgacattgaaataattctcactttctcttgattcggccctctccaatttacagcataatgaattgcctcaataatttgctcataacttccagaaccatctcccgctaaaacttttaatactaacattttagcaagtggtgcaactcctaatacaccgacaccattttcagtcgcggcaatcgttcccgcaacatgagtaccatgtccgttattatcaagatacacatttggatcagcttcataatcttttgtgaaatttcttccgccgataatacgatcttttaaatctatatgattagtatcacaccctgtatctaatacggcaacgactacatcttgccccttcacactcttttcccatacttgcggagcgtgaatcagttgtacacctggtggaatttcatttacttgttctaccaccttatttacggtaaacggaatcaattgtatacctttttgtttattcactgtactactcatcgtaatccctcctgaaaatgtattattttcatttcagaccacttttgaatacgtgtaaatgtaacattcgttttattctttttgttttccttcttttcaaatatttctcaacatcatttactacctctataatacttctttattttccctatgatttgtaggaagtaacaacccgagtcgttcaactaataaccaaaataagaggaccaattaatggtcctcttacagtcttttaaaagaatgatatgtatttgaaaaataatataaattaagactaaacctcactcttgtttaaaaacttttctatttcttttactaaatattccgctccctctatgccaactgtaatatttccatttgctaatgtaatattctgccctgaaacatcacctgtgatttggcaagcattgtaaggttgatatttttgtaaaatgattttatctgcttctacaaaaatttcaagcggtgatttgatttgtattcccaatacatcgcgtaattctttagggataacaattcgtcctaattcgtctacttttcgaataactcctgttgctttcatatttctccccccttactctctattaattttttcacctcgctttttccattttatcactttttgacaatacttgcctctttttagaaaattttgtactcgagttaaaaaaacacatttaatgcatacgtaatctctctttcaattgttttacataacgggatcttataagtaagaagtatacaacttgaataactatgaaaatacttaatacaactgtattttctttaaacaatgagtactcaaacatttgccctaacgccgttaaggctactgctccatgtaatgttgcaacaccaattggaacgaagaataaaagcgccaatcgaattgtaactaccttcgataattccctacttgtcaatccaactttacgaatcatttcgaacaaacgaacatcatcctccaaatcggagaataaacggaagtaaaggaaacttcctgcgcaaacgaaaaatactataccaataaagaaacctacaaataaaatcggtcctgcaatttgtaaactttggttttgctcgtactcttccgcactaaacgttgaatattcttgatacggtttaatttgatgcgtaagctctttaccaatttcaatctcatctttcgttctttcagttttatacatataatcttttgtctctataaacccatcttgtaatgaatcatattgattattagagattacataaacatttcctcttaatattttccccaatgaagatgaagtaacttttttcacttttaaattttcattcatattaggtaaagtaatttcttttctttctttcatcgttggccctggtatattagctgacaaaaatacaacttctttatttgctacagtattaaatggttctcctgttaactttgcatatttcttatagtctgattcttttataaaaatggcgcttcttaacgactgttcctccgttttctttgtcgaaatattagtttttgaagctgctatactatgtttctttaatcctttgtcaatcatttgtatatgctgtgattcgttactattcccttgcttagaatggtaatgaaacgaaatcggtctctccattatccctttcgtcatggatgcgaagccaactaatgtccctattgcggaaaatgctacagtagaaataatggttacaataaagaacattcttgcgttatctctcatgcgatacgctaaatctgataacgtaataatattagtctgtgtccaataaaaacgtttactttttttacataatcgaataataaagacactcagctgcttgtacaacaaatacgtcccaataataactaccgttgtaacaggaatcatcataataaataccattgctccatgtgatagaagagctcctacatagccagcactaagcaatactactgctaatatggaagaaatgattgatgctttcggttcaggtttcgcctctgccgatcctctaaacaacttcataatcttatttttacgaatcattcctgcactaaacaatgatatgatcataaataaaataaaaaacataatactcgttacaacaattgctttcatcggtatgtaataggataaggagatatctagtttcaatatcatcggagcgacaaatagtaatacccctgaaaataacatacctgaaagaataccaaaaataattgcccctattccaatcataatattttcaaaaaagattagacgctttaattgatatttcgtcatacctaacatcattaaaatccctagttcacgctttctcgtttttaaaaacattcccatcgaatataaaataaagaagaatgtaaataagtaaataatagactgtgcaaaagacatacttacgaatacgtactgacctaattctcctgcacttaatgccggatgaaacgcaaaaaatgaatacacaaaaaaggccataattgcaaatgcactactcaaaaaataggctgagtatgtccgtctatttcgggttacattccgatatgctagttctctaatgttcatattacttctccgcccttctactatctatgtttttatattagtaaagtgcggaaataccttccatcgattcaaatgacaaaaaccttacatttttgaaaggtttaaaaaaattgcttatacgtagtactttatttataatgactacattcatattcatattcatacacacatcctattgtatattcgttaattttgcgaaataataaaggatagaagtatgtaccattatacatataaacttaattaccgctttaatatgaataggaggaaacataatgacattacaagaacagattatgaaagcattacatgttcagcctgtaattgatccaaaagttgaaattcgtaaacgagttgatttcttaaaggattatgtaaaaaaaacaggtgcaaaaggatttgtacttggtattagcggcggacaagactctacattagcaggacgcttagcacaacttgcagttgaagaaattcgtaacgaaggtggtaatgcaacgtttatcgccgtgcgtcttccttataaagtacaaaaagatgaagatgatgcacaattagcattacaattcattcaagcagatcaatctgttgcatttgatattgcttcaactgttgatgctttttcaaatcaatatgaaaacttattgggtgaatcattaacagatttcaataaaggtaacgtgaaagcacgtatccgtatggttactcaatatgcaattggtggacaaaaagggctacttgttatcggaacagatcacgctgcagaagctgtaacagggttctttacaaaattcggagatggtggtgcagatttattaccattaacgggattaacgaagcgccaaggacgtgcattattacaagagttaggtgcagacgagcgactttacttaaaaatgccaacagctgatttattagatgaaaaaccaggtcaagctgatgaaacagagttaggtattacttatgatcaattagatgattatttagaaggtaaagcagttccagctgacgttgcagagaaaattgaaaaacgttacacagtgagtgagcataaaagacaagtaccagcgtcaatgtttgatgattggtggaaataaattaaacataaaaaagaagctaatcttcatttagcttcttttttatatgttaacgatatacccctactcttttctccaataaatcttgcaggcaatcttcatgttgtttacaaaataacggtggcatgtcgtctaacgggaaaaacttcaaatccagcgtttcatcaccatctacttttttgtcacctccaactattgagaatgaaaagaacatcacaattgactgagccttgtctccatttggatatgattgaaaatattttgtatacactccaataagctcatttatttctacatcatacccggtttcttctttgatttctcggattgcagtttccgcagctgattctcctatctccattgcaccacctggaaatccccaagcgttaaagtctcctcttttttgcagtaatacttctccttctttattaaatacacaaccaccggcaaagtttaagaaaacataatcatgtcctactttttcacgtaattcttttatataattggccattctctttccccttttcatacctcttctatcgctatttcttatctttttcaagcaattcaatgattcgatctagcttctggttcatattaatcacgtggtgtttctttgcagcactgctttgtaatactcttctaataaacaaagtaaatgatatgaaaaacaaaacgataagtccgattactaaacaagtatatatcaatgtaaaaatattactttcgaacaagttcattccacattcacatccttatccatttattctatcacacaattcttaatattcaaaagcaatcaattaataaaaaaagcaccttttacagatgctttttcccattgcttaatacgtaaatgtaattgtcgctaatgaataacccgccaatgcactgtaaggcgctacttgataagacacacgctttgcaccttttggccaatttatttcatttaatactttctttatatcttgcatcgttccatccatggactgcttatatcgcacttctactttttctggcttggctgcaaactgttgctgcaactttttcttaaattcattataattttctgctccgtattctgcagataagtattgtaaatttgtttcttttaacatctgctcatatacgacagtttttgagctaccagcttttattttatttgttaattcaccaaaataacttgtagttgccgctggatatttgctacgatcccattcatgatctttacttaactgttcgtcagacatattaaaatatgagtaagttacacgccctgctttatctggtactggatcatcaaatgtagtatctaggtgataccatttgttttcaatgttcactaaattccacgcgtgagcttgtccatttcctgtgcctgttacaatatgattttgaatacctgcctcttttaacaactcatacgttaataatgtatatccttggcaaacggcagaacgattcgctaatgcttcatatgctgtatacgcttgataagacgtatcataagacacatgcttaacaacgtaatcgtgaatagcttttactttctcatgctcatccatccctagttttacaattgatccaacaattgatttcgcctgagcttttacatattgagtttgttcttttgattcacggtattttacttgcagtgtaaacgtatagtcccctggcattcctttaatagaatatctagtagacgctacattatattttacatactcatcagcatctacaattttattaaactcaccatacaattgatccataatatttctagcatttctatcttttgttttatatgtgattgtaatattctcttctcgattatcaatctgtttttttaattcttttctgaaatcatctaataactttacatctgattgtgctgtcactgtagtcggatttgtagctgcataagatacagatgacgcttgtaagcctcccattactatagttgaacaaagtgcggcagctgtcacatacttacttgtctttcccatcttgtcactccttatattctataactatacgaaaaagtatcgtatagtttcagagtatacaatactttttcgtataggtcatatgagattatgcatattaactaattcacataaaaaggttgttctttttaaaagaacaaccttttttcattagcatgtttgtaatacgcagcatgtattttcaaaacgttgatttttcaaatcttcattactaatacagaaatatagcatccctagttctccccaaaccatattacaatttttatgatctgaatcaatttggaataaaagagtcatttgctgcgggtctactcccatatattctcccgtctcatataacacttcttcttgtacagagaatggctcaccaaacatttgatggttatcgtagttatccggaattagctcttcaagtaattgcaagaaacgatctgaatcagcctcatcttcaatgaaaagttctggtaatttgtatgtcagttcaaaagtaattgcacactggttatatttcgcttgtacttcatttcctcttcgtaattgctctacaggaacatcataataaagtacacccccagcctctgttagcttcacattttcttcaaaataattttcaatgcaaaagaaatacagcatccccgtcttaggaagattgtgatccataccaacgttttgtaaatcacttaagttaaattgcgcgataaattgtagtggatttcctttatgctttggatattcaaataaagctggtaaatcaggaactcctcccattttcgaactacctatcgcaacagtttcctgctgctttggcacaacttttatacaaggaaatacagtattaataagttcctctttcaagtgtgttagttcatatttatcaattaatacttcaatttttttattcataaattctccttacatttacatacttatttatatcatagtacaaagattatacttcattctttacaaaatcaacaagcctccaaaaaacgggcttatccttcgtacgcgaacaagtttaaaaaagcatactatacattgttcctacaaacacgatagttctttagttcttccagtacattttcccctcgttcatttttatttttaatataaggaggaattccacatgggttacggatatagttgcggcggttacggcggtagctgtggtggttgtggttacggaggtttcgctttattaatcgttttattcatccttctaatcatcatcggagctagctgttggggcggctttgtaggctgctagtaaacttaaaaaccattgtaaaaaagcacgtacaatacgtgcttttttgccatttccaaatcttttatttgaaaggaagtatgtttaatgaagattgatggtgtttttgaaggaggcggtgtgcgcggtattgcgcatgttggggcaatttgcgcgttagccgaaaaaggttatgaatgggaacgtgtagctggaacatcagctggtgcaattatcgcggcacttttagctgcaggatattcttgttcagagctaaaaaccattataactgatatcgattataataaatttacgaagaaaacctttattgacaaaatcccctttatcggaaaaggactaagtgcatggactactctaggtatatactctaatgtatttatagaagaatggattgaagaattacttcgaaaaaaaggtgttcatttatttactgatttaccggatctaaacaaactcaaaatcatcgcttctgatattagtaatggtaaaatggttgtctttcctgacgacttaccaaactatggatttttaaattatcgcttctctatcgctaaagcggtaagaatgagtagtacaatccccttcttctttgaacccgtaaaatggagaactccaaaatggaagcagccttgttatatggttgacggaggaattctaagtaattatccaatttggatcttcgattcacctaccgctcctcgctggccgactttcggatttcattttgtaaaagatgagattcaagctgaccctgctcactataacgagcctatttctatgttcaaaggactatttaaaacaatgatgcaagctcatgatttacgtcatttagataaggaatcaaaagcaagaacaattacaattccaacaggaacgattacaagtactaattttgaactgacgaaggaagaaaaagactggctttacaattctggttataactctgctaataaatttttacaagcttggaactttaggcaatatattgatgagtatagaaaaggaaatcaagaccgaaagacaaatcgattttttcgtcaacttgactcataatattattactttgcgtataaatacgagaacgtttaacaacttaatagtaaataagcctagtaaattcttatattactagacttatttacttcctatataatctcatacattgtttaaggatacgttaagccttcggcttcttctgcagttataactatgtaacgatttcccgttcttaatcctaacagttctgctttttcaatcgcctcttgcttcgtctccgcataagcagctaaatattttcctccattgatcatttggcaaattacatattgtttcattactttctcctcttactttttcattagttgtgcaagtttttttatacctatttcaatttcttctaacgttgcgtatgaatacgataggcgcaaaaattgatttgcacttctatcatataaagtacctgggtttaataaaaccttttcttgcagagctttatcaaataaactgcgatatgaaatgggtacttttatatgtacccatatataaaacccgcctgttggttcatgccaagttgctatttcacgaagatatttatctaacattagtaacataaaatctcttcgttttttcaattcacttcttacaaatcgcaaatgctcatcatatagaccatttgtaaaccactctgctgcaatttgctgggatatagtgcttgaaccataatctgtttgcatctttatgtctgacaatctttgaattactggctcgggtccaacaatccatccaattcttaaacctggactaattactttggacatgcttccaatatgtagtacgattccatttttatcataggcctttaaaggtttcgaactaggtgcatcaaaccataagtcttgatacactgcgtcctctataataggtaatccaatttcattacatatttccatcacttctattcgtttcttcgcattcatactaaagttcgttggattatgaaaagacgggattgtatataaaatagaggcattaaattgcttcttatatttcttaatatatgatgtatgtaacccgctttcatccattgggattccaattaaacgtactcctgctgattgaaaaacattaagcgaatataaataggatggtttctctaataagattgatgcccctttcgaaagaagccccatagaaataagttgcagcgcttgaattgctcctgaaacaattaatatagagtcaggagatacatatacgccatgctcctttaagtattcggaaatcttttcccttaaataaagatttcctttcggctcttcatacccaagcgtcacatttgactttaaaaggttattcataatttctttcatctttttctcaggtaagagactcggcgcgagctcacctgttcctaaccgaattacatgtgggtaaaattcagcttgattaatctcttgaatagctgggagattcggataatgaagtcctgtttctacataagactgccaattaggcgggggtgcgtaagttgaaacattctcattattatttacaacaattgttcctttcctgccattcccttcaatatatcccttcgcaactagttcatcgaaagccattacaattgtgcttcgattcacaccaaatgtatgggccaaatctctttgtgaaggtaatttcgttccaacggtccattctccattaacgatcctttcttttatatacgtttctatttgtttatacagcggcgtcgctagagacatatccggtttccaaacgaatctttccatcatatcaccttatattctttttggttggtaacctccccaaccatatggatggatacaaattttcatttcttctatacaatatacactatcataatgaattaaaataggaggtaatatgatgagtgaagcaattattcatggtatcattcttgcatttggacttatcattccattaggtgtacaaaatgtttttgtctttaaccaaggtgcgagccaaccaaacatttggagggcagcccctgtagtattaactgcctctatatgtgatacgttactcatattgattgcagtgcaaggtgtctcccttgtactccttactttttcttggctaactaactcattatatataattggatttttctttctcctatacatgggctttgttatttggagaagtagcccttccaacgatgtaacacaagaaaaaagtatgcccttaaaaaagcaaatccttttcgcagcatcagtttcgttattaaatccacatgctattttagacacaatcggtgtaattggaacaaattctattcaatacataggaagtgaaaaatgggctttcacacttgcaactattatcgtttcttggatttggtttataagcttagctttagcggggaaatttctaaaaagactagactcaaccggaaagacaattttattattaaataaattttctggtctcatcatatggggtgtcgcactttatatgttaaaacaagttatttattcttaatgaacgaaagagaattgcatgttactcaaaacatcatgcaattctcttacaaattatgaagtaggttccggtttctgttttaccgcctttgcatcctttgctggtttaatccaaatgattgctatgacagcaccaatggcagcgaaaatactagtcaaataaaacacttcatggtccgcccctttcatgaaaaaagaatataaaggtggtccagctgctacaccgataaatcgcattgaactgtaaaatgacgtaactgttcccctttgctccttttcaattccttgtgtaatgagggcatctaaacatgggagtgccataccaatccctatccccataataacgagacaaagaagtagtaaataaatcccttttataaataaaggaatgatgactgatgcagctgccattaaaaacccaatatagatacacttcttcataacattttgattatctccaatttttttaccggccatatatgaactaagtgacagtacaagtaacgggatagcaagcacacaccctttccatataccatgaatgtcatactttgattccagtatagtcgacaaataaaagagaattccgaataaaataagcataataattgcacctaatgcaaaaatggcaattaaccatcttcctttttctcgaaacgtagacagaatagattttataaactctttaagtggtggtacttctccttcttgtttctttgcctttactagaacaagtaataaaacaattgatactacgcataaaattggaatcgcccaaaatggtaagaaccatacaacggcagcaagagcagaccctaaaatagggctcagcactttcccaaatgtattggatgtttctatgattcctaaacctgtactaacttgtttttcgtctttgtataaatcaccaacacacggtataacaactggcattgcaccagcagcaccaataccttgaatcgctctaccaatcaatatccaattgtagggattatcaactttccaagatacccaaccagttatcgctcctcctatagctgcaatcagcaaactcggaaccattaccatctttcgtccccatctatctgataaataaccagcaatcggtataagtagaatggctacgatagagtaaattgtaataatcatggatacttgaaacgatgaaatatgtaatttcttttcaatagtcggcagaattgggatgagcattgaattccctaatgtcataacaagtggaactgatgcaagcgcaattaaacaacagttttctttttttaacatgttggcttcgaaacctttcatcatatatttcttaccatataatagccccgctggaacgtaacttttcattccaccagggctattacatctttactacttcccattcacaacaaaagaaattggggaaattatagtattattcctattctttgaatccagttcacaatatatccataccaattaattgaaaaaaaagaaaggaagaatccttcctttctcctataaccttctacaattagcgagtatatccgccaccaagttgttgttctgccatcgctacaaggcgttttgtaatttcaccgcctacagaaccgtttgcacgtgaagaagtatcagcgccaagttgtacaccaaactcttgtgcaatttcatatttcatttgatctaaagctgcttgtgctccatgtgatgctaattgattagaattacgatttctagccattaccaatcacctccttatttatatataaattgtgttaaattcaaattaaaatacatggaaatttttggttattttttaccataaaaaaagagcctctaaaacgagactctcacatcatttcacattacgaagttactacttctaattttctatttattaatactttcatttcttcttttaatatctcttttgcattatgtccaaaccattctaaggaagcaaaaagatccgtacctctcacttcctgaataatctcatcataatttacaataccttcaaataacggaaccataccaatacgacttcctgctgcagcatatacattattaggttcaaacacatgcaaataatccgctgaagatatattcttaaaatggtaatgtagtgtccacggctttaatcgatggaaactgtctattggatctgcgccagactcccatatatggagaaaatcaagatttatttttaaattcggatgatttacttcttctaatagttctatagtagaaggcaatgtgtctgttagtgtattgggatgtgtttctaacagcacatacatattgtgctgagcaaacacatcacaaatcttacgtattcgctttacatactcttttctctcttgttccgagaagtccttgctccctttttgcccagcaaacgtgcgaattttattcgtattaaaccaattagctagtactacaagttgttcacttttctctatcgttttttcaaaatctgctgataatgatatatctaagtaatcacttatcatcgtaatttctaagtttttatcctttagaaaagtcaattctcgttctgtcgtttcgcgttcttgtatatacaaattttgtgcatgagtcccccacaattcaattccttcaaaaccgttttcatatgcaaattgaacaatatcagtaaatgaaattaattgatgacgaaatgaaatggtacatagcgaatatttcatagcattaaactcccctatcttaaattcagttagcttattaaaaagttgcgacagactgatttgttttcatacctttccatgatagaaactgtctctctaattccttcttaatttgcagttcaattgcattcatttcatccagtttttcaataatcgatactagcatacctttattattcgtcattgccattttaattgcacgatactgtacatttgtaaatccttgtacaatatcctctacccgatcacaccaataatcaaattcttgctccgaatattgcaacgtttcacggaagtatgcaaaggcatgctcataactatatttacgaattgcaagtactggtatttgttttactgctgctacaagaccagaaagcgcatatccttcttcctcatttgccatttttacaattaaatttttcagttccatagtcagttcattgtcgttctttttgaatgtttctgtgaaataactagctactgtttcttgcgttggctccccaattccttctatatcaatgaaataacctccaccaaatgggttatcttgaatagagtgaagtactttttctctttccatatttccttcccaacgaaaatcaggatctagcatgaaccactcttcttctttctctgtttttgatatcattaaataatgtggaaacggtttttgatgaaatttattttccctctctggtaatagagacatatcaaccattacaatgacataacgattttccggcttgttttctactaattctaaaaacgtttctacattgctatctttatcttttgcatgatcataccattcgtttactttaataccgtacaatttttcaaaccaaagtaaataatgatcatggttaatgttttcagagtgatatgaaataattccgccttctgttatatcaaaatctccatcccatagtccaaaataaaatggacgaaaatcaatgtcgctacgcctttttataatttcacaaaaacaactcactaaacagtgcacttttattgaagtcatactctcatccactttcctaaaggttagttattcacatttacttcttgtaactcctccataaaatcaagcaaagatcctacagtaagaaatgcctttggatctacctcatcctctggaacgcatagctttatatccatttctatgtatacaataagctgtaacatcattaccgaatctatatataaatcttgatttaagcgcatcgtttcttctaaatgcgttacatttttcagttccattttttctatcataatttttaacacggcattctttaacgcttcccgtctcatgttgtaacctctcccatctctagtaactttctacttacttttccagttttatttttaggaatttcatttacactttcaatttcatggggaactttataagaaggtaagtgctgaatacaccattctcttatttgtactggatcaacatgagagatcactttcgctttaactatttcgcccatgacaggatgtttccctcgatatacaattgcctcttgaacaccttccaatcgaagcatcgtttcttctacctctataggaaagacttttaatcccgaaacattaattacatcgtccatacgccccataaaatgaatgccacgctcagatttataccctaaatctttcgtgaagatttccttatcattcattttcacgacgatttcttccggtgcattttcatctgaacctatgcttatactcgcatgaggtagagggtttcctaaatctaaatggctcttcatatcatgacatatactaatacaacctgcttcagaacaaccgtattgctgcatcatatatgttgtcatttcttttagtttataaaatagtgcttctggcaagggcgatcctgatgtcataattttatgaaactggaacgttcctaatggaaaactccccataatgtgtaacataagtggtactgcatatataatatgtttctctgtattgcgaactatatttaatgcgaatttaggatttttattcgtaatgattacaggctggctccccctcttaattgctgataaagtaccacatattagtccgtatgaatgtgaaacaggagccataacgattggcacttcatctacttcacagtttaaagcttcattataagcggtaatttccgtatcaacttccgtccatgctctacgaattagtttcggttcccctgtagttccagaactatattgcaataaagaaggctcttctagtaaaaagttccctacttctaattttgtaaaatcgccatattctccatataaaattcctacacaatttgcacgctttgccattttaatagctgtttcttttggtgtatcttcatgtataagtaatactgatgatttcttttcttttaagaaaaacacaatcgtaataatatcgaatggatctttcagacaaagtgcaaatctatttccttctgcttctttaaattgttccatttcctcataaacttgtaatctcgattcaaaatcacttttgctatactcttgtttattaacgattagcataatttccccctgtaacagctgatttttgtttcataagttgtcttactctatacaatggatttggaacttcatgaacaagcgattccagatccatatataatcgacgtttcgttaattgttcagcatagaatgtaggtgcatataattgaatattttcaaatctacctttcaaatgtggatatattcttaaatgattttcaatttcttcaacaaccatcatccaaaaatgttcttctttcaatccatattcatccgcaagtacgaatgctaattctcctaaattaaacaggaatagtgcatctaacaccatctcttgcaaacattcaatgcgatccatttcaaagaaatcattcatttttccattcgcatatgttttatgcattttagtaaagtcgggacatttgtcaaccgttttcaaatatggacgataaaactcaagcccttcatgaaaatcctttaacgcaatacgaacaggcaccccttctttatggactagaatcatattttgtccatgtgattccagtgcgatgccatgctctacaacaagatgtataactggtattatcgctttttgaataagtaattgtagccaatccttcattccatatttattcaaccacgcatcaataattggtgtaccatttttctctttagcgtataaaccattaaaaggaattgcatcttcttgtgcatctaaatacttatgaatgctttcgcgccaaatacatcctaatgaaccatatatagcttttttattcgtgtcatacgttacactggaaaactcatttaacaagattaaacgtgcttcatccattaaataggcgtcattacttacaacatcatttaaccaatttgatattgctggtgcactcacaacagagtatggtttcagcgtacgaagtgttgaagtgttgagtaaattcatcgataatttaacgtacggtttctttggactcgtaatatttcttaatgttctcattgactgttgcgcgcaataatcgtcctcagatgttcctaaataaataataaatttcccctgtatatgatccgcataatttgaaatgatgaaattcacccactgccatgggtgaacaggtataaacacgtactgttttggattacatcccttattacgaattcgttccataaactcttctaatttacgatcgccaatctcctcttttaaaaggttgttatacatcacttcattctcataacctataaatgctaacttaaatatgtacattaacgcttgaataaatatgtacattttcagaagactacattgataatcttaaaaatttctggaatgtttcagaaacaaagttagttcaatttatattagaaaatgatcaaaattattatgcatgggtaccaaaagaagcaagtatcccaaatatgtatgaagtaaagatagagagtgtcgatgtagaggaagttctataacgaacaaatcgaaatgttttttattatatgtaatattagaatgcattttactagttaattgaaaacaatgcatgcgtggcagaaaaaaggatgtatcgttactaaaaattagagggaaagaagggtgttggattgagttaagcacctcattgtcaatatacgacaataggtgcttttttgcgtgcaatgaagaaaaaataaaagattcattttcactctatttcatctttgaaatacatgttataatttggaaaaaatatattcttaatttttagataattgaaaggtggtagattactatatgagtacattaaagaaaattactaacaatatttcgaaagttattataggaaaaaacgaatcgatagaactagcagccattgctctaatagcaagggggcatattttattagaagatgtacctggaacaggaaaaacaacgttagcgaaaagcttggctaaaagtgtggacgctaaatttcaaagaatacaatttacagcggatactttgccgggagatgttattggtcttgaatattttgatgtgaaggaatccgaatttaaaacgaggttgggtcctatttttgcaaatatagtagtagtagacgaaataaatcgtgctgtaccgagaacgcaatcttcgttactggaagtgatggaagaacgtactgttacgattgcgaaacagacacattcattaccagaaccctttttagtaattgcaacgcaaaatcctcttgaatccgccggtacatttcctttacctgatgctcagttagatcgatttttacttactatacgccaaggctatcctacaagagaagcagaaaaggagatgatgaatcgtttccaaacaaatgatccgttagaaacgttacattccattatttcaactgaagaaattattacagtgcaaaagcgtgcaagagaagtgttagtagggaatgatgtgcaagattatctccttgaaattattgaagcaactcgtaaccatgagttaattgaaattggtgtaagccctcggggaacgttggcatttatgagagcaattcaagcacgggcaatattaaatgaaagagattactgtacgccagatgatattaagacgctcgctgcatccgtttgtgctcatcgtttaacgttaacgattgagggagagatgaaaacgacgaaagaacaaattatgaaagaaattcttcatacgattagtgtgctagtggagaatgtacgatgaatcaacagcttgtgtatacacctttagcggagcctttcgtaatgggggttatgtcagttgtagccgttattttaagtgtattttcaagcaatctactgtttttatctctcgtatttttatatgtaattttaataggtgctatgcatgtatatatacgtaaagtatctcgtgttgaatgggaatacagtcaagggagttcgaatgtttttataggtgaaacgaatatgtgcaaaatgaaaatttcaaacaagtcgatatttcctattcttaatatcgtatttcgatttaaatgtgaaaataagctaacttggaatcatgatgaaataaacaaaaattatagtacaggttcaaattattatatgaattttaatttaaaaggaagggagtcagtttcatttgatttgcaagctgtagcgttaaaaagaggcatcgcgaaatgggaagaagttgaaattgtcattacggatccctttggattcataacgaaccatataacgtataaacaagttggaacgccgtcttatttagttttaccagctgttccgaaaatgcaagttcctgaattgcaagaatggtcacgagggtttcgaaaagcgatgtcatcccccttatatgatgaaacgaaagtaatgggagtgaagtcgtatgaaaatgaagattttcgttctatccactggagtgcaacagcgaaaacagggacgataaccgcgaaaaagtacgagcgaacacaatcagataaatatgcgatatatctcaacttgcaaaataaaagcggtatttctttgcgaaatgatacagaggaactcattgaattaacggcaggcatatgtaaacaactgcttatgcaaaactgttcatttgaagtatggatcaatagcgtaaaagataacggtttgctacatataaagaacggtcataaccgaaaacatttgcaaaatgtattaaaagtacttgcctcaatatcggaccaagatactcctgtatcgtctacttatttttacacagcaggctttcggcgaaaagaattggatgcagttcctttaattcttggtacttccccaaagaaatacagtagaacgaataaatgggtcgtaattaaagaataagaaggggtttatgttatggctaataaagagcgacatatgaaggtgaaggtttggagtattagagttttcatgatacttttctttacggttagtgcgataacgttatcacaaggtgttgtgcatgtacaagacatagtaaaagggcttttttctagtaagacggagacaatatcggaaagaaattatgattttactagtttagatgaacagtttgatgaacctgaaagaattatagatgaagaaacaggagttgtagatacaagaacaaaaatagataggaaaattccactttttgtacgaaaaaattcatggactgatgtgttttctgttctttcaaatgcatggattagtgtcgttttttatgtaattattgcagtggtcattctctatgctttttataaattaacgaggagaaaggtaacgaaattagaaatagaacaggataaacaatcgataacaaaagaaaatatggatagaaccgaaaagaacaagaaagtgaagcatcagtttgaacagccgttacttaaagataagataaggcaaacgttagtggaatgggaaagaacattaccgtttcatgaacagagaaggtcatatgaaacgatgcaacaatggttaagcagaatttgtagaacgcaagatattattccgatatatgagtctgtccgatatggagaaaagacgtatacggagttagatgtagagaagactgtacgatggatagagcgagacgggaaggcgtgacattaatataagtaaatgaaattaactgtaaattaatttcatttacttatatttaattacatggtaatgtatacttacttttttatatctctaccaatgtaaaaaggtagccttagtaaagtattgctcgttgaattttttttgaggttatcttcacttcatcaatatagaatgaaaaagtgatgaatccattacgggtatcatgtaaataaaaaatataatttatatttaaatttttgtgagggtgtgaaaatagaatgaaaccggtattgaaaaacatactcctttcctttattttttctgcagcagggatgtgttggttcctatttatgttagttagaggagacggagattggttattgtcttgggtaggtgtattaatggcctttttatctttatacacgttaatagatttatattgtaagtatacatacgataaaaaattaagtgaattgtttatcaaagcaacaattactacctttagttttgcagtattgggaatcacatttggtattgtacacgagctattacagccatggagtcttagtttaatggtttggtattggttgttagtgttacttttatttgtaacgaccataatattattagtttttgtattatttgttaatcgtaaaaattataatattcctgggagatatagaatacttatactgtttaatctatttcttacgttagccccagtgctgtggccattactacttactcttatcgggaatggcatgaacgctagtgcaggatggtaaaagtgaatgaactaaaaagttgatatagggttttaagtatgtaagagaacgtgttttgataaattgaaaacacgttctttttttattttcatacattactttttctcatctgggcgtctaattttgaaagtaagtatttcgtaaggaatggataagaaaaaagagagatttattatataagatgaaagtgtagcttgaatcaatacgatatggatagaggagagaaccttatgaaaaaatgtacttcaataaagttaggaagttttgcagttttaatagcgggtactactcttttcgcaccaggttttaatgtgaaagcagagtctactcaaaatatttctagtccgtcacaagcacaggatcaaaagaatcggaatagttggaaacaaataatgcaggaaacagtacagcttggaacaccaggggtattagcgagggcatcaaacaatggaaagattagtagttatactgcaggcgtcgcggatttaaatagtaagaaaccaatgaaatcggattatcgttttcggattggaagtgtgacgaagacttttactgctacgactgttcttcaattagtaggagaaaatcgtgtacaacttgacgattctattgaaaagtggctacctggcctcattcaaggaaatggatatgatggcaatcaaattacgatacgtcaacttttgaaccatacaagtggtatagctgaatatttaaagtcaaaagacgctgacattatgaattcgaaaaaaacgtatacagcagaagaaatagtggaaatagggcttgctctacctccagatttttcgccaggtaaaggttggtcgtattcaaacacgggatacgtaatactaggaatgcttattgaaaaaataactggtaatagttatgcggaagaaattgaaaagcgaattattgaacctttggacttgttaaatacgtttttaccaggtaattcaccagtcatcccaggaaagaatcatgctcgagggtatatgaaaattgacgaaacaagtgaattgaaagacatgacgtattataatccgagtttagctaattcagcgggagatatgatttcagatgcggacgatttaaataagttcttttcatctttgctcggtggtaagttattgaaagaacgcgagctaaaagaaatgcttactacagttccaatagaaggaaaagatcttggtgatggatatggccttgggatctatgagacgaaacttccaaacggtgtttcagtttggggtcacggaggagcaattcctgggtttatgacttttgctggcggagtaattggaggcaagcatacatttgctgtcaatgttaactctttaggtgcggctggtattcttacacagtttaataaaatgatgcaaattgaatttaagaaataaatgaaaagaatgtaaatgggatcctgttttaagggcagtattagtattcatagtatggcatcaagtgtaattcaaacttatagtctggtggtaaaaaaggatgtcggttacacgacatccttttttattgagaatcaaagaggtgtgttttgaattttgaaaattgttatttttgcaatcattccatataatgaaaggtataggggatatacaggggagttatgaatggagaatactttagtttgttaattgtttttattttaataaataaaagtaaattgatttggagtgaaattcattgggagaaaatcagtttagatggagtaacacacaattacgagaacatgttgaagtaatagatggtaaaagaagtccgcacattttatgtaagaacgcaacttatttaaattcctatatgcgcgagtggatgcaagcaaatatttggatctatgatgaccggattgtttatgtaggggaaaagctgccagtgcaactgcatgaatgtgaagtcattgattgtgatggaaagtatgtagttccaagttacatagaacctcatgcacatccgtatcaattatataatcctgaaactttagcgaatcatgcgatgcagtttgggacaacaacttttattaatgataatttaactttatttttcacattacaacgtgaagaagcatttcgtttattagatgaatttgaaaagattccagcaagtatgtattggtggtgtcgttttgatggacaaactgaattgcaaaacggggaaactttatttaatcgtgaagaaataatagaatggcttaagcataaagcagttcttcaaggcggcgaactaacagcgtggccaaaactattacatggcgatgatgaaatgttaacttggatgcaggaaacgaagcgattgcagaagaaagtagaaggacattttccaggtgcatctgaaacgactttagcgaagttaaaactgttaggtacagattgtgatcatgaagcgatgacagggcaggaagctttcactcgtcttatgcaaggttacactgtttccctaagaaattcttcaatccgcccagatttagaagttttactgaaagaattgttggaactaggcgtaaagcagtttgatagattcttttttacaacagacggctcacatccttcgttttatgagaatggaatgacaaacgttatgatttctaccgcgataaaacaaggagtgccagtaatagatgcatacgatatggcaagttataatattgctcgttattataatatggaacatgtacatggttcgattgcgacaggtagaattgctaatatcaatattttagaaagtaaagaaaacccagtaccaattagtgtccttgcaaaggggaaatgggtgaagcgtgacggtgtaaatacacatgaggcattacatatagactggagtaaacataaagtaactccattatcattagattggtcaatagaaaaagaggatatgattttctctaataaaacggggatacacttattaaataacgttattacaaaaccatacactagtgaaatcaatatagactgtgatgaattgtccacagatcatgatgaatgtttccttatgatgattgcccgtgatggcagttggcaagtgaatacagctgtgaaaggttttgcgaaaaaactaggtgggcttgctagctcttattctggtacaggtgacatcattcttatcggaaaaagaaaagaagatatgctaacagcttttcgtagagtaaaagagctcggtggtggaatggtcatagtagaaaacaatgaagtgttacacgaaatagcattaccattgctcgggattatgtctaatttaaaaatgagagaattaatacaggaagagaaacagatggtgaaattactacaagagcgtggctacgcgtatgatgatccagcatttacaattttattcttttctgcgacgcacttgccttttatacgagtaacacctataggattatatgatgtgaaaagtagtaaggtagttgccccgcccgtgaatttgataaagcaatattaaaaggaaagatcctataaaaattttattttataggatctttcttattattagcataagaatattgtaagcctcaaatgatatagtatctaaatcatttgaggtgatatgtaaatatgaaaaaaatattttacattttaagcgtatttattctgtgtgtatcgatacaacacgttgtacattcccaatcagatgcaccagagttatcttcggattgtctcgaagaaagaaaagttagagatgaaaagtatgtgaagaatataatacaggacattaaatccacatttaatttaaatattgatgaacatagtttttgggaagtaagtaaaagagatttggaggctgcccatttgatgtatggtggaaaggaaaatgattcttattataattcgctaactaaaatttatgacagtggtagatttagcgaacagcccagcctatttgtgagggcgcaagaagcatttttactttataaagaacaagataatatcaatgtaatgaaaagcctaaaactagacgttgaaaaaggggaatggctcgttataaaaacgaaaaagaagaaagggaaaaaagtgaaattcaagccgttgcaatgtgaaaaagattatatgaaaaagagaaatgaataacaaaatacttattcatgctattttattcaacgatattttgctgttgatatgaaataacaaaggtaaacgaacatattagctttatggaatatgtttgtttacctttgtttgagagatttaaaaattgggatgttgttagttgaaatttatttactggctaatgagcttatagcattcaatgaatttgttcttcataaacattagattttgtgtcaaatgatttatacattgccgaatcacctatgtatattttattctacagtatttataaaaaatgttggctattcataagaaatataattggcacagtttttgcttgtattacatgtaaggaagggagattgtatgtaaggaatctgtactcgtaatagtataaaacaagctactattgcattattaatcatatttgtatttatggcggaactgtaaatacatacaaataagtggttttttggttttaaaattctgaattttcttttaaattgttagggggcaatggtatggttaaatattcgaaaatttctaagtggattcttggtgtgggactagtgacgataacatgtaatggtttgcaaattcaagcagagacaaaagagaaaaatgtgaagaacgtattacaaatggagccggtaggaatacagaaatctgttgatgaattggcgcacccttcaaaagtacaagaaaatgcatcttttacaaaacgattaaaattagcggatttatcgcagcgtccactagcaccaaccgataatattaaaccgttagctgaagaaaaaaagtattcaatggctgagttaaatcaattaaataacaaacaattaactgatcttcttgtgacaattaaatggtatcaaattccggaattatttcagtttaatagtgatagtcttaaattctatcaagatgatagtcgaatgcaagcaattattaataaactagcagaacaaggacaaacttatacgaaagatgattcaaaaggaattgaaacattagtagaagctctacgtgcagcattttatttaggtttttaccatgatgaattaagcaaactaaatgagcgtagctaccatgataaatgtttaccagctttaaaaacaattgcaaaaaatccaaatttcaaacttggtacatcagaacaaaataaagtaattgcatcatatggaaaattaattggaaatgcatcagcagatgttgaaacggttttatatgcaggtgaaatttttaaacaatataacgataatcttgcaactttcattgaagaccgaacaaaaggagacgctatatatgagttgatgaagggaattgactttgatattcagacggatatgtacacgactggaaaagagccaaaagatacgatgtggtatcgaaatatcgataactttattaatgaaataaatcgttttgcactacttggtacagtaacaaataaaaacggatggttaattaataatggaatttactatgctggccgattgggcaagcttcatagcacgccgacaaaaggacaacaagttgctacagatgcaatgcgaatttatccatatttaggagagcaatactttgttgcggcagaacaaattactacaaattatggaggaatagatgcgaatggaaaaactgtaaatttagatcaaattcgagaagagggtaaaaagaaatatttaccgaaaacgtatacgtttgatgatggtgcaattgtctttaaagctggggataaagttagcgaagagaaaattaaacgtctatactgggcggcaaaagaagtgcgttctcaattttatcgtacagttggtagcgataaaccacttgaaagtggacatgctgatgatgtgttaacgatggttatttataatagcccagatgagtatcaatttaatcgtcaactgtacggatatgaaacgaataatggtgggatttatattgaagggacagggactttctttacatatgaacgtacaccagagcaaagtatttatagtctggaagaattgttccgccatgaatttacgcactacttacagggaaggtacgaagttcagggattatggggccaaggggaaatgtatcaaaatgaacgtttaacatggtttgaagaagggaatgcagagttctttgcaggtgcaacgcgattagatagtgtagtaccacgaaaaagtataattggtgggttatctaatgatcctacaaaacgttatacagcatcacaaacattaaatgcgaaatatggaacgtgggatttttataattattcgtttgcactacaatcatatatgtataataagcgcccagaaatgttcgataaagtacatgatttaattcgcgcaaatgatgtttcaagttacgatgaataccgtgctacattaagcaaagataataagttaaatgaagaatatcaatcttatatgcaaatgcttattgataatcgtgataagtatacaattccacaagtatcagatgagtatttaactcagcatgatccaaaatcgctttcggacgttacttcagatattacgaatgaagcgaaactaaaagatgtgaaagtaacaaagaataaatcacaattctttaatacatttacactacaggggacatatacaggaagtgcggctaaaggagaagttgaggactggaaagtgatgaatgaagcaacaaatgatatgttgaaacgcctttcaggaaaagagtggactggatataaaacattgactgcttattttgtaaattaccgtgtaaataatgctgggcaatttgaatatgatgttgtgtttagcggagtgaatacggaagaaggtacggctgtagaaaaagaaccaaataattcatttgaaacagcaaacccactatctttgaatattttgttaagaggaaccttgagcgatcaagatcagggggataaatttgttattgatgtaaaggatcaaaaagatttacaaatttcggttacgaacgaacaaaatcttggattgaactgggtattatattctgaatcagatctaaataattatgtagcttatgcaacaaaacgtgatggaaacaaattgcttggaaattataatgcaaagccagggaaatattacttaagtgtatataagtatggtggtggaacagggaattatacggtacaagtaaaatagtttactatagtttgttttgaaaggctacttatcgcattttgtagcgaaataaagtagtttaatgttaaacattaaactacttcaatatatccctgttctaattatagaacagggatatattggctttacatttttaaattaaataatctcattggattttgataagaaaataattaatatagatttgaattctcattcgtaaagcatgttttaatcttcttaatgctctttcatttttgtctcaatgtttgttttcaaatcagtggatactcgattgaaataccccaaaacgatcttcctaatatcatcggatataactttcaaatcactagctaagttttcagcgagatgttctttttctattggctgtaacttcgtataaaattcactagcctgcgtaaagttatcctgtttcgttatagaagttctttcaagtttaccttcaacgtaccttccttcaccggttgtaatttgattagcaggtgtccaatcttgctgctggttaatcgttaatttacgaaattcgggaccaattcttcttctttgtgaatcactgtaaatgttagcgcgcccttgcagcattttatcatctgatagttctgcaccatccagtaaattagaaggggagaatgcgactttttctacttgttccataaaattttcaggatttttatttaataccattttcccgactggtatgagaggatacgtttgttcatcccatacttttgtgtcatctaaaggatcataagaaaggtgcgcttcatctttcggatccatgagctggacgtataaaccatactccactggtttaccattttcaatagcatcatataaatctttcccgctataatcaggattttcggcagctagtttaattgcttctttactagtaatgtactgtacaccttcaaacgggtaccaatgatactttacatactttcgattaccttccgcatttctccatacatatgtattaacactatgtcctggaatgtggcgaagacttttggccgtaccattattagagtataaacggacaacaaaatgaatagattcaggtgctttagcgacaaaactccaaaatctattagggtctattaagttatttttaggtgaaggcaataatgcttgaatcgtttcagggaaacgcatcggatcacggacagaaaaaacaggaatgtgattacataaaaggtcaaaaatgccttcttttgtataaaattttgtagaaaaaccgcgtacatttctagcagtatccggtgttcctttcgtactaacagctaacgaaaatcgcaccataacaggaactttctcattagaattttgtaaaaaacttaatttagtatgttcagacatcgaatatatcgtttgaaaataaccgaacgcaccaaatccttttacatgaacaggtctttctaaaattttttcatgaataaattcttgtaacgtctcgtgaagtacactatcttgctctagaacaggtccacgtgaaccaactgtttgtgagtggagtgtagcttgttcattacgttctctatcttcattaaagtcattccctagtaaagattgcccctgtttatcatagttttcattcatcgatatagcctccaaatttatttcgtctattgttactaaatatgattttataaccttgattatgtatgacatgcaaagtagtaacagaccgctagatgaaaaaaatgcacatgtagtggacctgttgaaatagaagaaattatggaaaaatgaatatcgtgaagaaaattactattaaaattttaatctgaaaaataaatttatagagaataaacataaataaacagggaaaataactaggaggaatttaacatgtcggattggtttcaattagataaggaatatatgatgtctacgtattgtcgtacgaaggttgcaatagaaagaggagaagggtgcaagctttatgatgtggatggtaaagcgtatatagacctattttctggcgtcggagtaaacgtattagggtataatcatccgaaaattgtgcaaacaacaatggaacaagttacaaaatcgttgcatctgccgtttcattttttaaacccagttgcaattgagtatgctaagaaattagtggattgctcattaaaaaacggaaaggtcttttttacaaactcaggtacggaagcgacagaaacgacgttgaaattaattgataaatatagagctaatatgaatgaagaatgtgaaggaattgtagtgctaaagaatagtttccatgggcgtacgttaggggcactacattttacgagacaagaaagtgtatatcaaaatttccctgaaacatcgattcctgtatacgaagtagagcgcgaaaatatagaccaattagaagagactattattaaagaaaacccaattgcgattatgctagagcctgtattaggaagtggggggatttatcctttatcaagtgaatatttgcatggtattcaatatttatgtgaaaaatataatgtacttcttgtcgttgatgaagttcaaagtggtatggggagaaccgggaaactgtttgcgtatcaaaattttaatattacaccggacattattcaaattggtaaaggagcaggaggcgggataccgctagggggaattattgtaggtgaaaagttatgtgatgtattttcaccaggagatcacgggacaacatttgctcattcatcaatgggaacagctttaggtttaactgtattaaatacattacttgatgaggggttaatgcaagaagcttatgaaacgtcactatatttgaatgacaaactgcaagacattcagaaagaaaattcttattatattcaggaagtgcgtcatgctggcatgatgtttggaattagtctgaatgatacgaatgaaaatgtgaagaaattacaggttgagctaatgaataaaggaatgttagtcgatgtaacacaagggaatattattcgattacttccgccgtatattattacaaaagaggaaattgatgcatttattaatcagtttatttcttgtctggttaaagtagctgttttaacaattgtttaaaaataaatttcaagttctactcttcagaatacattcttttttgaattgtaatttatgaaaaaaaaactatcttttatacagatagtttttttttcataaatatatcagtagctatgaaatattcttaattatttcttcagttgtgattggtaaaatagtatgtcttcatctaccaaaaaaatgtgtctaaaaggggaataatttgagttattgatttgaattttaaaagttttatttcagaagcattattttatttagtaatttatatattactagacgacatttgtctggtaaaaagccaaaaaataagaatgctagaacattttcaaaaaaataacatacgaatataaatataatgagaatgaggtgatatgttggaatacaaggatattcaattcacgtccttacaaatgagaactgatagatttgggtgggccggtattcaatatacaaataaaaagcaagctattttatttactcgaaatggaggggaagaatgggatattgtcaatcctcttaattctataatattatccatatatccgataaactctcgaagctcttgggcatatggtttaacaaaaacgaatgataatctagtgcctgctatattttatacagttaacagaggggaaaaatggagtgagtttattttaccaattgaagaaaattgggagaaatcgactgatgttcaggtacaattgcatgccacgaatatggatagtatatggattataatatctagaaaactcgcatcgaataaatttgagcataatttgtattatttgaaaactaaaggacaagtatggaaggtaataagaaaaataaatattagtgatagtatatcaggtgtaacatttataaataggttagttggttttatttctctacaaaaaaaatataaagaatcaacgatatataaaacgatagatggtggtagaacttggcaccctataaaaaacaatcagaatattcaagaggttaataacgggaattccatggcttataaaacgatctataaaaataacttgttagcgataccaacaaaaacgaatgataatatattttttataaattattcatttgataaaggtaatacatggcatactccaaatcgaaaaataaacactagtaaagttgctatttcttttttcagtgcacattatggttgggttataaatagtgagaacggagatgtgtatcaagtaaagaaaaaagcatcggaatggataaaattatcaagtaatccgttgttaaaaaatgtattttgtttacattttataaatgagcatagtggctgggcttgtagtaaagaagaaatatttactacaacagataggggtataacctggaagaaagtgttatataaaattaatcatattgataaattaacttaaaaaagagtcctaaaaaattaggactttttttatgatttttaaaaggcgagagttgtaatatacataattagaagggggaaggataaaagcgtaaagcatatattttcaaaaaaatggacgtttgtttttacacagtacaatccatttttgaatatattgataaagtagcaaatttagagggaatagtaatacttaatattttatgttcatattaatgatgccacatggtgtgtaaaaaagggggattgtaatgagatcattaacagttattatttcgtatagtgatagagcacaaatattagaagatttaattaaaaatgtatgggagctaaacccaattgaaattattgttatgctccctaatgatagaagtaaattatatgaaatagcaaagaaatatagatgccgaattgttttgacagagaaatatagtgggcattatcgcggatatgaagcttttataaaggaagcaagaggagatgctttattatttttagatggtaaattttcattatctacagatgaaatgaagggatttattgaaccaattgttacaaatcaggctgatgtaattttgaataaaatagataagtttatagaaatagataaatgtccgaatgtggatattgtatggagaaaaatgttaaatgaaattttaggtcggccagatttaaaatgcaattcaatgctttcattaccatatgtgcttacgaaggaagtattggttaatatcggttgtgattttatagaagatgccattctttctcatatcaagattgtgagtcaagggtggcggattagcgatcaatatgcaataaacactttatctaaagatgaaactttagaagaaaaaggatatttaataaaaaaggaactatcaaaaaatgaaaaagagaaagtgaaaaaatatctaattggaatatctaaagggatagaggaaaaagggagaagaggagggtttactgatgcaggaaaaagaagagatattattcaaaggttaggtgaattaaaacaatacccttgttatcatcaaggttttgggatgcattcttcaatttatggtggaaagcaactttctgtaattataccggtgcaggatgaagaagaaactatagaacaagtgatacttgagactagaaaaatagaaccgctagaaattattgttgttgtaaatgggtcaacagataataccgccaatattgctaaaagtcttggtgctactgttattaaatataacgagcgacttggccataatgttggacgtgcaattggggcacttgaagcgataggagatattctcttatttattgatggtgattttagtatttcaggaagtgatttgcattgctttacgcaagcagtctcagatggtgtagatatagcattaaataatctaaatccaagtttaaatccgcctttttatattgttgatattgtaaagtatatgcttaatttagcatataatcgtcctgaattaagtaatggttcgttagtagctattccacatgcaatgagtagatcatgtttagatgcaataggatgggaaactttattatgccctagccttgctcaagtgaaagctatattacaaggatacagagtagagtgtgtgcactatgtagatgttgtaaagccgaatagaattcgtttaaaagaacatgtagattacactgggcatcctccagcagtattaagaattctgggtgatcatattgaagcactctcctacttaatagaaaagttagattagggcaatgagttatataagagaattggtgaggtgtaaaaatgaagaaattactttccataatcatattagttgaatatgaaataggtttgttaaatgaaattattcagagtgctaaaagtttatttccatatgagattattatagtaataaatgagaagcgaaacataaacaaaaaaactctaactgaatctggagttaaatgtattagaagtgattcagaaaatatgcgtgttataggggcaaaagaagcaaaaggagatatattgttatttttagatgatagtaatagtatttctgcatgtgaacttaaacaatttatgcaacctgctattaaagataatgcagatgtggttttaaataacttgcactctttctttattgaaagacagaaaaaagaatttccaggtgctaatattatttggagacaaattataaatgaagtgttaggagcgaatgaattaaaaataaattctttgctctctttaccaaatataattacaaaaaaagctttacaagaaattaaatatgaaactcttaaaaaccctgttttggcgcaaataagacttattgaagaagaaaaaaagtttagttgccattactttatagaaacacaattggctaaagagttttgtttagaagaaagagcattaaatgaaagatcattagtagatatagaaaagaaaaatatgaacaaacacttagttgctatggcagaatggttaatgaaaactggaattaggggaatgtatcatgatgttacaagaaatcgaaaacttgtaaatattcttaaaaaacataataccatccctttttcacaaaaaggatggggaattcaatcacaaaaatataacggaaaacaattgtctgtaattatacccgctcagaatgaggaagcaacaattggacaagtaatttgtgaagtgagaaaaattgagcccctagaaattattgtcgttgtaaatggttccacagataatacagcaaatgttgctacgcaacttggtgctactgttattacgtataaaaatccgttagggcatgatgtgggaagagcaattggcactgtagcagcaaagggagatattcttttatttttagatggtgatcttgttgtttctgcaaaagatctatatccatttccacaagctattgcagatggatgtgatgttgccttaaatgatttaaatccctttttatgtaaacattttccccttcatattgtcaccttatttaaatacgcgttgaacttagcatgtgatagaaaagatttaggtgtaggttcacttacagcaattccacatgcaattagtaaacaatttataaatgatatcggatgggatatattactctgtccaagcgttgcgcaggtaaacgctattttaaatgattacaagatagaatgtgtacattatgtagacgtaattaaaaataatcggctccgcccgaatgaaaatgttgtagcgaaaggaatttctccaactatatcactcattctgggagatcatttggagggtttctcttatttgttgaatcatagcaaaatgtaagtatattttagatagatgggaagggtgattaaactgttagatcagtataaaaaaatcaatatttcatatgaacaattacagcaaatgaattttcaaactacggaaccttttatactcaaaattgattgggataaagtagcttatgaatttttaattcgtattaagcataatgcttccaatgttattgtttttggctctggagcaggtggttttcaagaacaaccaattggtccacctatttttcatagacattcttggatggaagaatttgaagatactgttatatattataatgatcctactttatatcatggagaaatatctttaggttggggacagggggagttagatagattttatttacaagatatcgcaaatattttaaaactattattgataaagttgcaagttgattcgaaaaatgtgttgttttatggaagttccgggggaggatttatgtctttaatattagctggtttcgtaaagggttccacagctttagttaataatcctcaaacaaatttaatgaaatggatacctgtaccggtaaatcaagttttcaatttatcttatccaggcttatcaagagaagaaattgaagagaaatttggcgaaagaattaacatcacggatttttttaagagtattgaatacgttccaaatatttattttttacaaaatgtcgcatgtgaatttgatgtgcaaaatcacttactaccatttatttctgggttagagcaaatggatgaaaatacggaagtgaatcaaattttagtagacttatatttcgacaagaaagcagggcatgcagctttagagaagaatgaaacgattgaatatataaaaaaggtaaaacctaatcagactgtaagagaggtgaaagaaggagtggaattgtcagtcgttattgtcgtgggagagcaaaagtcgaaattaaatcgaattttagagaaattaaattatttaaaaccactagaaattatcattgtagctgataatagaatgaatactatacaatcaataacgacaattgttgaaagtaatgttgttgttattgaagagaaaaacaaatgtaaagcaccagttaatggggcaagaatagccaatggagatgctgtcttatttttagacggagaagatgttgttttttcagtggagttagcacaatttttaaagccgctattaaaaaaagaaacagatgtaatattgaataacgcagactccgtatattttgaaaaaatgaaaatagagtggccgagtattgctatggtgtatagaaaagtattaaatgacgtattaggacatatggatttaaagtatgattcgatgttatctatgtcatatgccatttcaaaaaaagtaattgaagacattggatatgacatcttacagaatcctatacttgctcaagcaacacttattgagaaagggtggcgagtacacacctcatcagcaattactaaaacctctttgaataatatatctacaaataaaaactctttctctggaaatgaattaactaaattagaagtgcgtgagattaaaaaaaatgtaaaagtattagaaaactggttacaacgaaaaggtgatagaggtaactatacggatggaggaaggaaaagagaaattatagagcaactaaaaatacaaaaaaattatttgcgtttccataaaggatggggaatgaagtcttctatttataatggaaaacagctatcaattattataccagcacaaaatgaagaagcgacgattaaacaagttattcttgaggcaagaaaaattgaaccgaaagaaataattgttgttataaatggatcgacagatcggacagaggaaatttcaaagcaattaggagcaacagtgattgtctatcaagaagcgttaggacatgatgtcgggcgtgcaattggtgcgcaggaggccataggagatatacttctctttatagatgccgattttgctattccagcaaaagatttacatccattaacgcaagctgttactgacggtgttgatattgctttaaacgatttaaatttaaatcttagattccctctatatattgtaaatatatataaatatatgttgaatattgcttgtaaccgtaaagatttaggagtgggatctcttgtagcggttcctcatgctattagtagaaaatgtttagagggaattggctgggatactcttcacacatcatgtattgcacaagtaaaagcaatattagaaggatataaagtagaatgtgttcattatgtagatgtaatgaaaccaaatcgtattcgaccacatgagcacttcgcgacaatagggcatccgccagctgtattaagaattactggtgatcatttagaaggcctttcgtatttattgaagcataggaattttaaagatttatttctattttaagaggtgattcagtcgattaatcaattgagaaatataaatatttcatatgagcaacttgaaggcatttattttaatatggaagaaccgtttttactaagtgtagaatggcaaggaataaattatgagtttattattagaatgaaattacaatcaaaaaaacttattattttgggttcgggggcaagtgaaaagcagtcgccacctatttttcaaagatacacttggattaaggatttcgaagaatctgtaattttttataatgatccaaccctttatttaggtgaaatttctttaggttgggggcaaggaacgatagataggtattacttgaaagatatagcgataattttagaaaaaataataagaaagataaatattttaaaagaaaatgtgttactttatggaagttcaggtggaggatttatgtcccttatattagcaggttatttaagagggactttcgcattggtcaacaatcctcaaaccatattaacaaattggtatactactcctattacacaagtttttcagctatcatatcctaacttatcaatacaagaaattaaagatacgtttgcagagagaataaatgttattgcattttataataagataggctatgtaccgccaatttattacttgcaaaatatagcagctgattttgatatgaaaaatcatttggagccttttataactggattacaagaattagaaaggatagatgctgtaaataaagttaaattagatttatattttgataaacaattagggcacatccctttagagaagaataaaattatgccatatatgaaacaaacgctctatgaagatagaatattgtaattaaaagttgagaatctcttcatgtatttgaagaagtttttacctctttagtttattttatctcactatttgcgggcagtaaaactcccacctcaaaattcggctgtagcaaagaagttaggtgggagttttactgcccataatagcacgattggtgagggttgaataaagttgtaacgatattattattttctcataaattgatattatgtgtaagaaaggagggaatatcttgtcttgcatcaacaagagttgttttaacatttgcttagaatctatagttaatccaaatggtggggcagaaatatttgtaaggtgcaatgatgaatgtccatctaatttcaatgtaataccattcattgcatgtatagctatttcagtaaaggatgattttagtttcttatcttatttagatagtttaataaaacgttaattaactatccaattaatattaaagaagcacctaatttattaaatttagtaagagagttgtatccgaatttaagtaactgcatatattgttaagagaaaggagggagagttatggcatgtactacgaataatgtttgttttgatgtgtgccttaagattacaattacccctggaagtggaattgatgcagtagtggattgtgggggtacatgtgggacaagtcctacaattgtaattagttctagtggatcaattgttattactttaccattaattgcatgtttctcaatctcgctaaacgatgatttaagtgttgcatcttcattaacaagcctctattttcaaacttcttaagaaagatacagaaatgaaaagcctgcctgctacttttcttttgatctaatgtaaaaataaaaaagatggttacaaccatcttttttattttgctatatatttaaaataaattcatatattatttggtggtaagaatatacaattaaaagcattcagtgtttcttttttgttcgatgaggtaagaaattgcttctatatgatcaccaatgatttgttgcgttgctaatgaaagaaaaccttcttgagagaagtgtttttctggtcgaacacgattcatcttatcaacatcgacagaatgggcatttttcacatgaaggcctgctaaaattgttttaacttgacttgaggtaggtgaaagaagtgaatcaaaaccaattgtatcaatacatttgcgactaaaagcatgaggcacagcaattgtggatcccatccctaaatcctttcgattacatgctaaattcacaacatatttacatgcggtcacgatagaataaggaaatcgatacatatagtaatactctaacttatttaaagctaaatctgtaccattttgaacagattgtacaaatggtaatagatcagaactaggaattaagaaatcaccatctataaataataatatatcaccttttgcaaaacgtgcgccaacagcacgtccagtatcattaccaagtggctctttgtagctaataactgttgcaccacaattctttgccaatgcctctgttttatctgttgctccattaacaataatgataatctctaaaggttttaatttttgtacctcataaattacagattctatcgttttttcttcattttgaacagggatgataaccgataattgtttatccccataagtattcgaataaaattctttacctgtacttatttttggcatatatttttgttcgccgttttgaagccctaaaataatatcccgccttcggctactatcagtgtagtttcctcttgaatcttgcgctatatttatccaatgttcaatagcttcaagatgataacaagtgagttgttttgaagggaaggaggggatttgaggtatataaatttttagatgattgcaaatctgaaatttatatttaataattttcatttgtgccaatatcggatttgataaactttctggagtaattgcctctagaactttttttgttattgcatagggaggaaataataatgagttaacatttaaatctgaacgatgaaaaaaatgattcgtaacttgctgccacatcattgctatattaggccgttgcttcttataaaaaaaataatccaaattatttaatactacatcagcggatccgtctagtaatggttgaagaaattgtataagtgtggaagattgaataatgtaattttcatctaaaaataataggcaattacctcttgccttttttgctccaattgtataacaaatattatattctgttgattcttctagtgtaataactttacaactgtaagatcgtgtaatatcaatacaatcatcaatacatccgttaataataagaataacttctaaaggtttcagttgttgacatgcttttagaatttcgggtaaaacgcttgtttgatgctgtatggggataataatagagattggatttttacacataagtagtctcctttttaatcagaggtagttattaataagaatagataaaataggagataaatattttcttgttacaaacatagcaattatttagttttatctgcctccgaattttcattaactgaattagaacctttgtttataccagaagctattaaattattgagaacactaagatctaattgcatagggattgagttttcggatgtagttttctcattttctttttttgtagttaatattgttcttatggtttttatttctttatattgttttaagatgatgaaaaaaccagaaatgattaagagaaaagacaaagaagtaagcaaaaatattatctccaacataaaatatcctccttcaaaaagaaaattataataatattatctaattaggtatttaatgatactccatatttttatggttgaatgcaataagaagaaattcgtattaatgagttcgcttttctaaatatatgcaaaatttcagtaaaagttactggtttttaagttagaggaaataattataggtacgttgtacaatctaatgaattaaagatttatttgtagtgtaaaggtatatattatataagctacacgtcattatataaaagttaaacagggtgtaactttatagaaaaagagcatttaattggacaaataattaattatgtgaaataataataacagataaggagacgttgtttttccttaagtgcttcgaattaattttattcaataagagaaggtgtgcttaaagaagttaaattaaataaggagctgttttattatatgcaacaaaataatgatttaaattttgaacctcaagacgttaatattgtcaatcctaaacaagccaggaaagcagtaattgctactggtatagggaacgcaatggagtggtttgacttcggattatacgcgtatttagcggtaattttaagtcaattattcttctcaggtgttgataatagtggattgcaacttgtacttacattcggtacatttgcagcagcctttctcgttcgaccaatcggaggtgtattctttggtagaataggagataagtacggccgaaaaatcgtgttaagtactactattattttaatggcactttctacattattcatcgcattactaccaacctatgaacaaattggtgtatgggcaccaatactacttttagttgcccgaatgattcaaggcttctctacaggcggcgaatattcaggagcaatggtttatatcgcagaatcttctccagataaaaagcgtggtatactcggtagtggtcttgaaattggaacactctcaggttacattgctgcatcggtaattgttaccattttgacgttattgttaacagatgagcaaatgctcagctggggatggcgtattccattcttaatagctgcaccaattggtttggtcggtttatacttacgccgtcatctagatgaatctccaatctttgaagagatggaaaaagcacaagaggaatctgaagacaatgaacaattttcatttatggatattattaaatatcacaaaaaagacttcttattaagcacagtaattgtcgccttctttaatattacaaattatatgattctttcgtatattccttcttatctaactcaagtacttaaagtcgaagaaacaacaggcttattaattatttctattacgatggcacttatgattccactagcactatatttcggtaaattaagtgataaaattggtaataaacgtgttgtgcaaattggtttacttggtttaactgtatttgcaattccagcatttttactaataggtaacggacatattgcagctatatttgcaggtattttcgtactaggtttcttcttaagtgtatatgaaggaacattaccttcattattaccatcactctttttcactgatgtacgttatcgagcactttcgatctcatttaatatttctgtatcgatattcggtggaacaacaccgcttgtatgttcatacttagttcatgcaactggtaacccgctcgcaccggcattttatttagcaggtgtaagtattattggattagttgtatttagtgtactattcgttacgacttcagggcgtgcgctaaaaggttcatatcctacagtagaaacgaaaaaagaagcacaccaaatcgctaaagaagatcctgaagaaacactttggtggcatgaagagtcattagaaattgaagcagggaagaatgcttccatttaaaaagcaacgtagaagtataaaaagactcctatgaatataggagtctttttgttacgttatttctttcgtttcttcaaacttttttgatatgcataaagcttatgaatctcttccataaattcatgtagaagtacagtgtttgcaccatttgaataccgcaccgtattataagcatctataataatatcactttgaatatttacatcttcttcatcgtttattctttctagccaagcctcaacagtttctccccgttttctatttaaaggagaggttaacttactctctagcttgaaaatttccttccgaatttcgttatgtggcggtttatttcgtttaaaacgattttggcttattccttctttatcagtaatgatagtagattcgaaggcgggcatatttggtaaacttaaatgttttcgtttttttactattttccaaacgacgtaaatagcgatagctgtacagactattattgtagcgctatttatgagtattggatcaaaatcaggaattttttttccgtcttcaattttgggttttaagagatgtcctttatttgcccaaacatcttcagtatcttttaattccgctgctttaattaatggcattaaagcatagccgacgcctaatgcgactacttccgttataaaaccaaaaataagtcgaatgaaaggaaatacttgaacaattaatatactcattaagccaatcgtaatgatagaagcaaaacgtaatagttgttgtttgcgatttgccccggttaaccaaaatgtaatcataagatgcaaggctaacattaatagtttccacaacggtggaaagggtgcataaaatatagctgaaacgacaaaccatacaataccacctaaagatttttgaactggatatccaggtccgaccacatgtacgataaagaaaaatagtggtaatatgattgtgccaaaaagagaaaaaggtaaaaataaagagaaaagaacgatttgaagaactaaaagtattacaaatcctgttgtttttttctgcataaatttatgaataagaaatactccaatatagcctgttgttaaaaatattgcaatactaattagttcatctctttctgttaataatgaaagcaggaggagcagaatgaaatcatgaatgtgatatagccaagttttcaactggttccaccatcccttcactagtaatgagaaacgttggctgcgagagaagagggagttcatttttttgtaaaccaatgtatatcattgtagacgatcgttctctctttctctttacataatgaaggaatccttgtttcggaagtaacgtactatcatctgaaatacgggctaattcttctaaagcttttgcatattgtgtttgtccttcatttaacggtacatgtaatgcaccgccttctgctaatacactaataaacaattcaaacggaatgtggtgcttcgttgtgtactggaaaatgtatgttgcatatgaaataagttcttctacattatctttccaaccaaatccacgatcggcagctaaagaaagacaaatcgtccaactataattttttacaggttcatattgcttcgcttgtaattgttgcattttagcagatgccttccaatgaatagagcggaaagactcacgctcatatcgctttacaccgataatagatgtttcatcattgtaaaaagaaaaattcgttcgataaaatccattcaaaagttgctgaagttcttgcaaacctgctacttctttaggagaaggatacacaataatttcagtccttaatttatcaaaaacaggtaaatgtacagttaatagatgaaatggatcttttaatacacattcaaactgttcaatttgaaacacaccacgcttcgttgcggttaatgttaaaccccatttttgtgccgaatgtgcgggttgtgaaaatgggaaagagaataatgtttttgatatttgttcaatgccttgctctttatgcggtataagggacgaatttaaatgaaagtaacaaacaccattaacgagcggtatgctggctccattttttaaatgaataaaaaactgtccagattcctcaggaaaaagccgtgtagtttgtttctcatttatgatttgaaacttcttctctatgaaagcgacatatttataaataaaaatcgcaaatatataatagaagaaaaagagaaacataagcattcgttgcgggaaaaagaatgtgaaaagtaacgcgattggaacggttagttgaataatatggagttgaaaaaataaaggcacagttacaacacgctgtccattcatgcttgctcaatctccacaggtacgtcaacttcttttaaaatactttgcattatatcatttttagtcgtgcgcagggcaccttccattgataagacgatacggtgattccaaacagaaggaactaacaattgtatatcttctggtgtgcaatattctctcccgcgtaaaaaggctaaagcttgaacagcacgtactaaagctaatgtggcacgtgggcttacaccgttagcgatataatcatgatttcttgtagcatgagcaagtttaataatgtaatgttctaacggttccgaaacaaatatttcttttactcgtttttgagattctaaaatatcttctaatgagatgacagatgtgacactttctaatggtaaatcgttccgaaaacgtcgcatcatttgtagctcatcttcaggagtaggataaccgattgaaatcgtcattaaaaagcgatcaagctgtgcatctggaagagggaaagtcccttgtgattcaattgggttttgcgtcgcaataacaaagaacggtttcggcagaggcgtagattgtttttcgagcgtcacttgtcgttcttccatcgcttctaacaaactcgactgcgttctcggcattgcacggttaatttcatctgctagcaaaatgtttgtcataactggtccaattcttaattcgaattcgcttgtttttgggttgaagtattcaatacctgttacatcacttggaagtacatcaggggtgaattgaacgcgagaaaaactaccaccaatacttttggaaatggttttcgccagtaacgttttcccagtaccaggcacgtcttcgagcaatacatgcccaccagcaagaagtgaaacgagcagtagatcaataacattttctttcccaacaaacacagatccgatgttttctttcaatttatttatcatatgtaccattcctttcattataaaagagctaatatttctatattttaacaaattattcagaaaatttgtatggttttttaattcaaagaaatggatatttaattattaaattactcttgcatattttggaatatgattatacaatatcgatatgcgatgtatcgtaagtcgatatatcataaggcgatgtatcggaggtagttataatgaatgggaaggcgcaaaaatatattccgttaactgaggcgacatattacatattattgtcactcgtgaagccgttgcatggctacggaattatgcaaatggtagaagagatgacaaatggggaagtaaagctcggccctggtactttatatggaaatacgacgaaattactaaaagagaagttaattgttgaagttgcctctacagacagaaagaagtgctatgagttaacgccgtttgggagagaagtgctggaactggagtacaatagattgcagagatctgtaaggaatggaaatagtatattaggggagtgaatgggaaatggagacaaagaaggtattcaaaccttttgcgatgtaaatgtcaagataaacatgtacattttcgcttgtttaagcatgtacaaaatcaataaagtattgttgtccttattcccccttttcggggggatgggcaaaaacacccttgtttaagataagaagaaaactgttttgcaacatccatgtgatttcctccgcgtctataaattgtgttgcgtctaaaagtatttatttatcgataaattgtgttgcgttaaacccctagatttatatttattataacacctaatacaacacaattaatattgtgttgtattattttttgtataaaaaaagacactgtatgtgtcttggaataatgatatattttctgattttttaactctgattttcttagcgtggtttttttccgaaatgctggcggtaccccagaaaacagttaagaagcgaagggtagctaaaataatagtgcaaaagagaactttggtttcattactgaagttctcttttttgaaaatatgcattatttcatatttgacaagtacggtttatcgacaatttacgacaaaatctctagtgttattatgctaagatacgacatgctaacattacgttaaaagaatattaaatggatcgagattattttttagttttgtttactttgatacttccagactgaaaggttcgattttaaaataataaattaaaaattagaaattacatagttctattcaaggagaaatgtttatgcatgataaaataaataaacaagaagaaactaaaaaagcgttaatagaatttctaagaatacttattgatgaaattgattttcaaagaagaactcatggtaagttagcggaacaaattgggattagtagtggcttgttatcaaggcgtttatcggggaaaaatcaattcaattttttgagtttaattaagttgttaaatattttatatgaaaatgatgcacttcaaaaacagaaattaatacacaagttttgtttacttaccacaagtaaacaaaacttacgtattgcgatggagtatgcgcatgctaaaggagatttgaatctgttaaaactactcgttgatcaggaaaaaacatcatcccttgcaacaaatagagaatgggcctatgtatatgatttggtatggacaaggggtcaagggactcttctaggtaaagagttacttgaaaagttagagagtagtaaaaagggtagagtaataaagacaactgaaatgaatgctttatatgatgttttgacatgttatattatgtatgatatagaaaaagtaacctcttttttcgaatatattgagatatcgaagccgaaattcactgaaataaaagatgaatttactagaaatatgtataaaattaggatgaaggaggttcatgctgctgcacatttgttggggggagatataaaaacttgtcgcaaattatgtaatgagattatagatacggaagatttgtatgatgttttttcgatacaaaaagcttcagcatattcgtatttagctgagtcatatacctttgattgctttgaaactgcatcaagttatgtgaaaatggctttgcaatatttagatacattgtattttaaaagagcggaagtaagaaaaaaacaaatattaaatacatatgggtttatgcagatggtacagtatttaactagtgagaaaccacttttcaacctaaatgatattaaggtgtttcatcctgctgaacaagctttattagaaacgctaaaaggaaatagagatacggcgataaagattataaaaaatatgaaaaaagagaatggatatctattaccaatagagtattgctatttaggattggcgatgaatgatatagaatacattcataaatctattgagttatttaggtataaaggaggagggttttatagtgaattaccgatttttatattgaaatatttttcggaaaatggtatcatgtataggagtgtagaaaatgaaaaaagtattatgtgtagttaaagttttagttatagttgctgttgtattatgtacagcttacgaaaaaaaagaatcatatcagatttcccaaaaacatgaaaagcctttacttgctaaaatggttaacccaggtggcggagttgggtaattaattatatttatgaatgcgattgtctcaaatgaggcaatcgcattcgctgtttttagggatgtttactaaatttcaaattcgtaatttagtaaaggattgtgatttgattcacaaactatgaaacgataactatattttaattactaattatcaagattttatattaacaaagctaaaaagaagtgttaaaatcagaacaaacgttctacgcatttccacaatttgtaatttagaaaagtcaaaaaaaatcccagttatctaatccgttgataacactgggttttccgaagacttttgatatgtagtttggttagatgtagcagtttttgagaaattatggattgacgataaaacacaatcgttgtaatcttaattttgaaagatgtttattagcatctaaattgtgaactactaacaattacatagttacatgggctgaaaataaaaagagctaccaactcttgatattttcgaccttttaaaacaacgacctgttttagaaaggctgcccacttaatgaagcataacgagatgcaacatcaataatattatactgtttcgtgtatttatacaagatatgtaaatgtatacgtacacgtgagtttaagcaatattattgatgttgtgcggttatccttcttaaaagtggttcttcggattgaagaaaaaggcgtagactaaaacattagtttacgccttttttgtattctgtaagaaacccattggctatatgaaaattttataatgctcacctttatatttgtaattgtttatgtggatagggttgagttaagaaacttgttaagtatgatgaatctagaccctgagaaagtctagatacaaactgaaattttaaagattggagagaagaaccatgagagaaaaagagtttagcaaaggtacacacaggcttaaagtaacaaaagagatggatgttggcactctattaaacagagcgcacaaagttagtacatttgatggcaagaatttagtcgttctcgacaatggcaatctgtacgatcaaacagttagaagagaagttccagtaacaaatatgtttaggtatatcaaatgcgtaagaaatagcgatggtatcatcattgccaagaagaataaaccatgtgctacattgatgcaggttatttttgagagaaaaacaaagaaaaaagtgaagtagtaatacatttgatcgatttaattgtgcaagaaatacagcacacttggggttcatagcttaaggacataattcttgtgtatgttccccatacgttctttgaaaacttgatatagttgctgggggaagggcaaatcatcgcatgccaatctatttcgtgaatctaggagatgcaagacacgaataaacccttagggacaatagtccgcttgaaaatagcaatcgatgttggtctatctgtagcaagcctacagactacttaaagggctgtacacatgacgccatgacggagaaattccaaagcgatatatttgtacaagcattcctttaacgagagggcgtaacgagactaaacgcccctgttacaaatggagatactcctttttcgcatttgtatccgaccgaatatagaccgtttattttttaaaaatcaagaatacaaaatattttttgtagaattaaacagatcaaataggagtaaaaaattatgagtatggaatgccgagaaaggtatattaggcaaatagcaaatattcttacaagcaaaacaaagcatgcaacaggctgcctaattgaaggcaaagatgatgtgtgtttagagtttcaaatagagctaataaacgcattacaagataatgatacacttgcttatcatgtagatttcaccgattatacaagcgaaactgaatgtcttgcagcgttgaaaaaggcacgtaaacaacttagttcaaataagcaagatggaaagacattatttctttctctagcttcctttgaacgtgtagagaagaaaacaatggatgcagtaaaaatattaattggtagccgatcactaggcatacatttactagttagtgcaaataagagattcgtccacttagtaggattaacagaatacttggttacaatgaacaaatcagatgtagtgttttctcagctgtaccgctatagcacacaaaaggtactggcttccctaaaaaatgattcatggggggaagctgatgaatcataaaatcgagaaaatattgagaacaaagagcattcatgtagatttgtttagattggatgaaagatatgatctcggacaaagtatagatgtttgctgtaataaaatgaatgtaattcatacctttaaagtgtttaacatcactttgctaagaggtaatcattggctcgttcatttgcagtaaggttgtagtatagcgctataaaagtagtggggtctcaaatgttcatatgttaatatattaatgtaatgaatataaatggaatggagtgtagagaccatgtttaaaaggtttaagtttttatcagctgtatcggctttatttatatctataacagtactgcttgcagggtgtggaggttcttcagtcccctataaaaagggtgatacttataaaaatagtaaagacaatttcgttactattacagctgacaacgaatggagagttaaagggtatcaaaatcgtgaagcaatttataaggtggagccaacggaatataaagttgattcgtattcagttgtatcaatttctgtaaaagaaaaaataaatggtagagatcctttgcaggttgtaaatgattatgaatattacatacttgcaactacagaaaaaggctttaattctgtgtatattggttcttcgcatccaaatgataccaaatggaaagaaatcaagaaagaattagaaagctctagtgataaagaggatcttttgaaaaaagagtatgagaataataagaagactctaaagaaattcgaaaagacaaattaggacatacaaataactgtaagagcagaatcatattaatggttctgctcttttttattgtcaaaattaagtagggcaatgggaggtaaggggatatgatcagccgagatcaactgttatttccagctatgataacttttatggttttaatgattttgttatttgatgcatcgctatcattcataatgattcttacagaaaagacaatgtagtaatggaaaacgtcaaatcagctgtaaaagatgcttgtttgtggttgttagttttggttttaacaactttaacctggctgggaattgaaaaaatggttattaccatgcttttagactaaatatattttttgtgtgcaaactctttttgcacattttaaatgggggaaagtcatgaatattgttgcaacatttcattttgtaagtggtttaagaagatcgactattatcaaatcggagaatatagagaaagcgagtatatttattaataataagttttttcagggtgttggacatgcaatatttgaagtagagatgcaagaaagtagagatggatttgaaggtattgatggtaaagtagaaaagtttgaagtgtttcgtgatcaagtaatgtttattgattatcaagtgaaataattttatgtaaagagagcagatccctgggggctgctctttttatgttttgagattagcaataaacaaagcatattgagtatcttcaatatgttttgtttgtaattaatcgataaattacaagttgattagaaagtggaggtgttagcatggtaaggcttggtcaagtcgaaaaagctgttgaaatcgtgaaggaagaagtacaggagcaagagaatgtaaacacagctgttgtaggtggaataggaacaggaaaagatttttctgttataatacctaacattctgctagaggaagaaaagaatttagtagtaatagatccaatagatcaaatatcaaatgtgtatacatttaaagaaaaacaaggatatcatattttaacgtataatttagaaaaagaagatattttgcggcagttaaataatgatttaatggcaaaaaaagaagaaaaacttttaattcatgtaatcttccctaatgaattttttggaaatcaagaaatgaatagtcaacgtgttatggaattcttaatggaaataaaagaaatgcaagatataaagtggggacaagaaaaatcattacatcttttccttatggaatatgaagaatatgcatctcctaagtttcatgctatttttcaaacatggtgtggatacagaattagcaccacgttgagcgttcagcatgtactaagattggatgatgttattctagataattgtcattatgtactttataaaagaatacttgatccacaaacagctgaatggattgcagagaagctgaaatatcatcatgtagaatttcactcgaaatttttagtaacaaacttattgtttttaccattgacagcgggtatgttaatggatttacctcttaatttaggaatcttacagaaaaactatagagataatccttatggaaatgattcatggacaaaacttgtagaaacttacaatgctgaggatattttgggcagagcgttatatcctaaagtgtaaaaaaatctaaagataaagatgataaaagagcagctccttaaaggtctgctctttttttatagtcagttgtgtataagagtggaggtaacagatatatttcttcctcctttccccaggtgatatagcgttgttacctctactcttatgtacatctaaaatattttaaacaagattggtactgaaaaagggtagatcctaaagggactgctctttttgttaaacagttgtatataaaagtagagggaggtgtttgtattggtaaaaaaacccctaataacggaatacgagttagctaatttgaagcataattcagagaaagaaaaacaagtggtgttagaaatttatagaatagcttttgaaaattttttagaaaaagagtttactagtaaatttcttactaaaaaaattagagagcaaatgaataaaggatttgatcatttaggaataagcctaatgaattgtaacattatggagaaccgtactagtttcaattttaaggatatgattagaaaaacattttcgaatttcttttgtaggtttttctataatagtgtcgttattaaatggaagtattggaaatatcgcaaagacgtaaaaagaattgtaggtatttgttgggaagatgaaataattgaacttagcatggaagaaattgcagaagaagtaatttataagagtaatgtttacttgaaaataattgatgatctagagaaatcaggattaagagtaagtgtgaaagttgatggtgaaatctttattttacttttaacctgggggaaatggatggagacggacaatgaagaaggttagaaaatgtaaaaagtgccagggcaaaggtttcatgttcggtaaaaattacataataaaagagaattcatttggttatgaaacgcaggagtttggtattaaagtaacctgtactaattgttatgggaaaggtattaaataattgtatgattctaaaaaaatataattggtattcagaaaatagatcctatactaaccgtagcaaacgaggggggaaatcatgaacaaggaagtcacaataaaaattaatgaaaaaggttgggaaatgttcgttcaagttggagagaacttatatgaagagaaaggtatcatgcagaagtttaatgatgctttaaacgtaaaaggcgtgttagacgaagatgctgcatggatgtcagatcctttgtttcaagtacttagtgaaaacttcttttgctatcaggtagcaaatgccttaataaaaagctagtaagagggtgaatgttttgaatgcagcagaaaaagaacgtaggataggtcaactggaagatgaaattggtggtatatggatatctttatttataggatgtattatgtttttggcgttacagtggggaatagaaccaatgatgaaaaatgtactagatagagagggttttccaactactcttgttgatattatttttaattatattattggtgctgctttctggatagggtatatcattggaattataactattttgaagaaaaagaaagaaattaggagatataaaaaagaaaaaaattctccttcaaaaattaatatacaaaaagatgatataaatcagaatcctgtttatgtaattgatcatagcaaggataaaaaaaatcgatatgaaaaaggggatagagatatgatgaagcgagtatttaaccaaaataacaatgtttctactaatttgggtaaacagaacactaataaaacgagaggtaaaggaagtccaatacgttcatacaatgggtctactcattcttctaatagtacggaaagtaatgacattaataatattgttttaggtgttgcattaggaagttcaatttattcttcaggggatgataataattgttcccaatcggattcttcatcgattggtgatagcggcccaagttgtgattaatggtttctgttgaggattaataaaataagagaatgtaaaagaaagagcagatcttaattggctgctcttttttattggtaaagattagctataaacaaagcatattaggtagtaatcagtatgttttgtttgtaattaatctcaaaaggaaaggcaatttaagaaattagggaagtggggatggagatatgaataagaaaaaagcattaattagtttagcgtacgctatggcgctatatagcttagtaggttgttcgaattctactaatacaggtactatggcagcggagaatgaaaaggctgctacaagtgtaaataaagaagttacaaataccgaagaaaattatgaattaggagaaattaagattacaaataaagaacgaaataaggaatcaagaattgaaattctagaagctcatattgttgatgatggtgtaaggggaactgatcctcgaaatacagccttacaagaagtaatcattttacatgataaggtacaagattgtaattatctttatacatatagctccagtagtacgggatcaggttcagcgacaatgaaaaagctagagtgtggtaagaaagagtaaggtgattctatgaagaagctaataaaaatgatatttagtatagagtgtctcatatttgcactgatgatatggtttttcttatggtcttatacatggatgactaatgaagcaaaagaggataaggtaaaatccctacaaacttatgaaaatattaaaatagcagaagagttaattgcaaaggaactaaataaggatattaaaaacattaagttatttgataatagacatggcaaagaactaaataatcaaaaatgggtagaagaggacatgaattgtaatgtcaaaacggatgatggaaagtataaagtgtattttaatgtcaaaaaaataattgataaaaaaacgaatactgaaatgtatgcccctaaaaatattgaaaagttagtaagggagtaacttaaaatggtcaatattattatcatttcaggaattgtttttctaatattagtattgctagttctttatatccattggctaataaattaaagggagagaagaagtatgaaaataaaagaaacagattgtaaatatacgtattgggaagaatcaataaaaatgttttataaaaagcaagaatgggaacgaaaaagacagcaagaaaatcaaggaaaacgagaaggtaagtagcatggattcgcaaacaaagaagaataccagatctaaaatagggttaattaaagtaataagcataattatctttattgttggagggctagtttatataggaattagttgggaggagtatcttgataagagcaataaggcgcatgctataaagatagaacaaacccatgaaaatataaaaatagcagaagggatgattgaaaaagaattaaatattagtagcaaatatttcaaaatgctcggtacacgcactcttttatttttatcagaagatgcagaactaaacaccaatacggatgcatattgggtaagtaaagatataacatgtaaagtacaagttaatggtgagaattatagcgttacttttgaaactcaaaaagtagatagtgaaaatgaagaattagaaatgtatgaaccagtaaaaattaacaagatcataaaggagcagaaatagtatgaaaaaattcttactaggatttgttcttatagggcttgttggttgtgtagatgttgataagccggtaacaggggattctgaagctgtacaagagatttcaagtgagaaagaaggtattaaggtttttgtagataaagagacagggtgtgagtatttatatagaaataaatttgttggaaatgttacatatggtggaatgacaattagactagatgaacagggtaaaccgaaagggtgtaaaaaaatctctgagcaaaattacaactaaatatggagggttacaatgtcagtttatattgaaggaattcatgaggattatacttatggattccttttttactctaaaaataaaagaattgttttggatgatggagttcaagagtacccaatagatgaagcagaagtactcctggaaaaagaattcgtgtttatagatgagttaaggaagcttgatccattaaaagtaccaggattaagagcaaggattaaattacaagtgaattaaatagaaatcaaaagtctatcaaagcctattggtagactttttagttttatttaaacagtaatgaagttggaagggaggagagaatataatgccagtctttcatgtttggtataaaaaaggaataacagatgaagataaattacatcaaattgtcaggtcgaaaaatgaaaataaggcaatattaaaaagtgatgcttataaggagggaaggtgtatagatgatgtgggaatagaaaaatatgagtgccttaaagcggaattcggtatgtctttaagggaggagttattcgagcttggatgggcatttcgatgtgcgaaatgttatcaggtagtaggtgatggcataatattaaccaaagtattccgtggaatattttgtgaatgttgcaaggaacagaatgccaaagaaattgatgagtattcacattttagaaaagttattgatgcaaggctaacttatatatttcgtattagttgtttgctcatcataattgggacgtgcatggctggatatatttatgatgggatttcattaccaggatttgttatgagttatcttttatggtgtacaaactggctgttttattatatttctgttaatcaatcaacgtttgagcctgagagtgacctgaaaaaagattcgattgcaataggcggttttacgtttatccctattgtgataaatttgcttgttactggtgaaattcctaattggttataccttgattggtttaatagccagtggttaaatttaagttcgtttttaatattagctgtaattttaatgataatagcgtatattatcatatttatattctgtgtattagtgcatgaagcgataccttctttaatacgatggttaaaacgacaaagaaagagctattggattgatttaaattatggtgattgggttatttataaaggatgtacttgtcaggtaataagttctaatactttatttcatagtaatagatattctgtaactcttgatgaatggagttaccttagtattgaaagtatcactcgcttagatggttattttatagttgaaaataaaaaaaacataactgtatttatggatgaggatgagattgaaagagtagcaacagaggaagaaattcaacaagaaataaatagaagaagtaaattcaagatatatgagtttaaggaaagatatgggttagaattcacatgtgagcaatatggacctgaactcatagacaatcgattttattcagagggtatcatgtttaataataccaaagttaagagcaaggattaaattacaagtgaattaaatggaaatcaaaagtctatcaaaaatatatggtaggctttttagttttatttaataaggagtggttaagagtgctgaacaaagtaactattgagtttggagaaggaacaaaagcctggaaggatatgcaggatgtaatgactattttaaaagaaaaaggatattctgttgaaccttatgaggaaattggcactgtaaaactaactaaggggattgttgatgagatgtctgaagaagatagaggagcagagtcattagcagcggtataccattctaagtaaattgtcatagcgctatgattcgactgaaaggaggtttatatggaagaaagagcaagaagtccaaccaatccccttctctcatgtgaggatagatcctcatggttgtaaagagaggaggaatacgattgtggtttagaaggtcatttagtttactatttgttgttatgcttctgtttggaagcttggccgactttgtatcaattggacatgcagaaagtacatcggaccagaaacaggctcaagagaaaaaaacggacgatgtgactgtgctgcaagaaaaatctgatctgaagagtacgggaactaatccaagcgaggtagttgtagcaaatggtaaaaaaggtagtgagttgtttgattttgaagcctttattaagccttcagacattgtagatggaacagcaccttttgattcgaatgatgaagcaggtaatgattctagccctaataatggcattgtaaggacgtttgatacagtaacgtacccattgaaagtgacgattaatcctaagaagaatgaaacgttaaaaaatattaagatgaaaatcactggtacattagaaaatggaattacaaacaagcgtgttaatgcaaaatttgctgttggtggtaaagaggatttggaaaagggtattgtttcttttgatatggaatacacgttaaaggaaacaggtaactccttaatgattcctgttacggtggaagtacaaggggcggagcatggattgaaattaaagcctaacattaaaatccaggttataagtgtagatgggaaagatattgcaaatgaaaatgtatcgcaatcatttgatggtattagtcccgttactacttcaggaaaggttaatgtaaaggctcgctttactgcttcttatggtggaatgcctagattggattataaggtttatgatcccaatgcaaaagaggatgatcgtacaatcatatatccagttgctttagatttatttgtaaataatttaccaaaccgaactgatttacgaggagctacattccctgctggaaagattaattatcactttaatttttcaggaaaagtcgattgggattataaatcgttaggtgcagaaacattgaattttgagggtcgggataaaccgataaagatctttaactatcaggctattgataaaatagtagataaagtgccacaagaaggtacggaaagttttgaaattggtatgaagggctataaagatcctcgtactgagacagcaaacagtcctaaatcatatattccaaaagatatatggaatgctagtgatattgataaatacacgattgacagtgtatgggatagtggaacagtacgtttgaataaaccagaaattacaaaggatcgtgtaggttatacgggtagtatagaagactatgtaattggttcaactttcccaacgatgatgtcaaggccaggttattcagtaattcctaccttcggaaagaatgaaaaagcattttcaagcacacgtttcttaatacattcaacaaatgaatattatcctgtactgggtaaaaataataaggataatctaccgaataatgttttttattatttagaatttgttattgattcttatgaggatggcaagggtaatacaattccttataacactgttggaagatacacgcttaccgaaaggaataaccctaaaggtgcatactccatacaaactacattccatacaacagatcataaggagttaggtacaccaaatgttggctatagcgctgtatctaaaggagatccaacagttatagtaggacaaaatgtaaaagtcgttagtcatttgaatgttcgtgctgttacagaaggtggtacaacgatgatttataagtggaatacagattcgttttatctatctaaaaatagtgcggaaacagctaggaagaacatgttaaacgaggggtatcccaacacttctgcgggaagggttacaaatagtgataaacaaaaaatctattttggaatatctaaaaaaggagataattcttttgaaacactaacccaaaacaaagatgaggattatgattggtatagcacatatgatgaagcaaagaaacaaggtgaagtagctgctatcaaaaatgatattaatgcatctatgggggatggtgaggttgtagcatggaatattccattagaggtaaaaacaaagaaaataggtagtgttaatgaaaaaggaacgccaaacataacggttacggattcaatagtgtatccttcagctgatagaaaagtgggttatcgagtacgtggtgaagggaaatataataactttactgagtatgatgaaaagggaaatataacaaaactgcaatctcctgtaggaagtactgtgaattttgaaacgctaggcattatgaatggtgagacgagtagtgatgtgaaaacaaataaaaatacttactacagttcagataatgttagtgtaaccgttgataatttagtaaagttacctgatgcaatggattataattcattagatgaaaaagtagaaatgagagtgaaaataccaaaaggtcttgattatgtggttggttctgctaaatatggtgatcagtatatcgaaccaaaaattgagcaacaaaatgatggaagtaatcatttgatttggcatgacacattgactcgtggtaataaaacgctcaaaaaaatcaactttgagacaagaattaatcctgtactacttccgcaaggaaatcaggtaggtttggaaattacgaatgttcttagtagtgcgatggacacaagggcagaaaaatttaggacaagttctaagaatatttcagttgtgaaaattggtatggttggtgttagtgaaacaattgagaaagtgacagggaaaaagaacagtgactatgtggtcggtgttcaaccgtatacgacaatcaaagatgagtcacatattaaggcacttacatatgttccaagaaataaggatcataatggatctgcttttaatggtgttactttcttgagacaaatagcactagaaaatgctaataataagaacgttgaaatatggcttaataacagctttgttgaatcaaataatccaaacaaaattgatttaaagtcaaatggttggtataggtatacaggagagcaggatctatcaaaagtggtctctattttgctgtatataaatgattcattaagtagcagcgatattgtaaaaatgaatcttgtttacggcacacataaaaatgaatttggagatttttacgtaagtaaaacagtggtaaatacctctgttgattacaaattatctcctgtttctaaccaggtgaaatatacaattgtagcagatgcaaatttaggtcttagaaaaataagaatcgatactgcacctgctgatattggtttgccagtaattgtacgtttagacaaggacatcatttatgaggactctaataagagtaatgttgctgttaacttatatgataagtctgataataagttggtagacagtaaagtatatacaattcaggaattaccggaggaaataaaattcaaggtagatcctaaatttttaaagaaaaataataagagaaactacgaggttagatttgaaaaagtcaataaagaatctatttttatcgtagatgggaaaggaaaagtagatacggatggttatacttcttctgaagaaactgtaaaggcaaatacaaaagcatctactgagttaaaatataaaggcgttataatgacggagcgtgaagtcggaaaagagatggaagtcttttatgaaacacttacaattccgttaaaacagctacctaaacaaaaaactggctatggttttgagttgaaaccattagttagttataacaatgaattagcggtttcttatgatgttaagacaaatgctttagtagataagagattaattgattctcatttgaattatgagaaaaaaggtgatcaatttgttgttcctttagaagaagctgagaaaacaggcagcacggacaaaaagaacactgattatctttttgaattgccacatattaatgtggaacaaaaaacgggtaatttatttacagaccaacaagtaaaagaccatgatccacgtattaagaatgcaataaaggatgggaagcgaaagttatatgttcctatttgggcagatctgggagaatacaacgttttaatagtatcgggaatccctataggcgctaataaagttaactttgaggtaacacaaccattaaatttatatgcatatatgtacgggacaattggctcgaaaaccctggaagatgatgaattactgttagagcctgttgatccaaaaaatcctttctcaaatggcaaaccgcctggttggtcagatgtagatgttgcttggttaaagcaataggaaaggagatgaaaaatgtgtgaatgtcctaacttatcattcggccaagaaacaaattatctttatggcgctatacttcgtaattacaggaatagtaattcgtttaattggatattcgttgcaaggcagcctttctgcttttacacaagctggcatcggaaatttactttcgggaaatttatcattaggtgatatgttccactttgactttagctttgatacgagtcaatttgatggatttagttttaatatgtggattgtttttataaaagacaagattcatagtattataaatgatttattgcctactacattaggagcaattaatatgcttatgatgggcaaatacttaacggtagagcgtgctattaaattaggcattaggttgtattaaaaaataaataattggtagaaaaagagacgtgattttttaattgcgtctcttttttatatacaaaaataaaaattgagaggatgtagtaaatatgttagatcaaaatacggatcgtagttggtggatgattggtgcagtttctgttggtggtgttttgttaggagcaatcctaatcgcttatcctgaaattttacaatcagtaattgatttgtttaagcaaaaactggctgctgcatcaaaataactcttttaaatgtggatgtttaaccattatccaacaaattagggggagtaagctctccctttatttgcttggaaaggagtgaaagaagtgaaagaacatcctttcatcctagtgataatcgttttagggattttcttagtttccataggtggttattactatagagagaattttgctactgattcagtcacacaaggagttacagagacagttcgagcgagtgtaatttcgaatgtagataatagctctcgtgtgcaaagtggagagctgtttattgtaaagagtgattttgaaaaggattttaaaaaacgtattgagtcaaataagcttgtgaaaatcagtaacgatgcaacatatgaatttaagtaccgagataataagaatggctctactaaagcaattcgagccattatccatgacggagatcaaacgtatcaagcaacttataaagtaagtattgcaacatcctagcagaaaggagaattgtatgttagaagcgtttaagaacgtagcagtaaaaaagaaaaaagacagtaaatttaacgattttagctctgtgaattttcaaaaatctttagaaacaataagaaatgatttgaaaaacagtaaagcggaattagttattgatgccatgttaaaagaagaagcaagacaaaaaatcaaagatattattaaagagaaatatgcagctcatttcatggattttccagaagataaattggttgaggtttatgagtatgtggtatctgaaattgttggaacaggtgttatagaaaggttaattaatgaacgtcctgatattactgatatatcatataactcaagtcacttaattgtagaatctagtgattataaagaaattcatagagacactgatcatcaaattacggaacagtatataacacgagtaatacagaaatttgctcatgcagtgggaaaagagtttgctcctaaatcacctatttttgatggtgtttatgactctgtacgtattaatgcggttcatcaccaaaatacaacagggaattctacaatgtcattaaggattgttcgtccgagattggcattacatgaaggaaactttgaaacatttgctcctacgttcatgcttgaattctttagaattctcatggaaacccgaaataacattgtgatttcaggagaaacagggacagggaaaaccgagtttttgaagcttttgttctcatatatccgatttgaacataaggcaattatgattgaagatgttcctgaaacgcatgtaaaaaaactatttcctgataaagatgtgtttagttggttaacgggacatggggttactgttacagatcttatagaagctgcattgcgaaataatccacgctggataatgatttcagaattacgtggtaaagaagcatatgagatgattcaagcggtgttctcaggacatcatattgttacttctttacactctgtagatgcagaaacttctccaaaacgacttgttaatatgtcaaagatgggataccaatttgatgaaaaatctctagaagaggatattttgcgctattttaattttggatgccatattaagcgattggtagtaaaaacaactaaacaagggaatgtacagattaatagagttattcgttatctagcaaaggttgtggaatattcgccagaaggtaacagaatggtatttgaacaaaaatataaaaatggtaaatttacttattcaacaggaaatctatctgatcaattttatgaaaagttagcggaaaatgatatgaattataaacttcctgattttaaggatgaagtagccgttaaaaaggatttaatcattagtagataaaaaatggaaaactccgagaaaggaggtaaaggtttgaaaatctctacttttaatgcaaaaacaagaaaaaagaaatttgtgaatgccgaagaaattaatgcattcaaggtagcatatgggaaacccttaaacaaaaaggattatatgagatatgcagctattccaggtctagttacaggggtattttcttttctcttactttatatatggtggctctcattaattttaggattgatgggggcactatacggattgaaagtgctaatgcctaatattattaaaagggcatatgagcgtgattcatttagggaaagaaataaatttgtcaataatatgacctctctcttatcgaatgaaaatcaaacattattaatctccttaaaacgagcgattaagcgtgcaaatggggagttgagggaagatttaaatatattaatggcaaatattattggggcggatcaaacacaggtgattcatgcttttaaacaactgtccaataaatatcgagaagatattacatttgatcagtatttagaacaacttgaaacatgtgttttagaggggagaacaaacctggagacattgaaagatattaaaactcatcacaatgaaacgaaagaaaaaaaggatgactatgcaagaaagaaagagggccatatgaaagatatgaaaactctttgttttattatagtagtgttcatcttggcaattactgtttcttttggtgttaatacgtatataacagcatttgcaagacaccctattggctgggttacgggtggtatttatatgagtacaatatttttcttctttaaatcctttactgcatactttttcgatgattcgataatggaggtcaaagtatgaagatagtaacagctaaaagtagtaaaaaaaatcgttacaatcgattactggcggaagaagatttatatagcatgttagaagaaatgggaaatacaaaggcaatgattgataaatttcaaaagagacgattgttacaatcatttgttatgtgtattttcggattgctattaggtttgtttctctccagttggtgctacctcatagcaattggtctaccaattttcttgtatcgttctaaatatacacacgttaataaggtatatagtgcttttaaatttgaaagacatttaaatttttctaaattcactagattattaatgccttacttgaaagaggcgggtgaatcagtgagtctatatcaagtttttcgtaaaatacttaatcgtatggaaaagccagtagataaaaattcgttagctaaattaatgtcggaaatgacagacaaaccaaatgatattcagccattcaccgattatgctatgcgttcaagtggtagcgatatgtcaataaactttatgcaacttgtttatgattttcaacaaaattcatcagatacaaacgttattaatgagttaggacaaatagcaagtgctgagttacaaagagcaatcgatgaaattatcgcttttaagttaagacgatttaatttcttccctacgaaaatggtaatgagttctttcatattagtagtagggtttgcagcagcggtattggtatatcacctatcatcaattaatctctcataaataataggggagggtgaaatgaaaatgagtgggtgtaaaatatgttagatggttcaattatgacaattgtaaaatggtttgtagggttaatgttaatcatgctgatggttgcagtaacccttttcggcattcaattgaacgatgtaaattcttataaacaacaggtgaattatcaaatagaacgacatggtggattaacaaaagaatctattcagaatttgaaggaatatagtgatcgtcaatacaaaggagcttttactataaaaagtgagcaactaaataaaaaagttaattacggtgacgttgttgattatcaggtaatagcaaatttgaaaatcatactttttaatttacctgatgtgaagatggaatttcatggatctgcaatctcgcaagtacgctagagagtaggtgtttgagaaatgctagaaaataatacttttcgcttaatagttcttatggggggagtaatcacacttattgcgattataacaatatgtttagatgaaaagcctaatatggaaggtttattccatcattttatttctcaaaaaaacacaaagtattaagtaaaggagtcaattagatatggctaggaaagttggtaaaaatgaaaaaacaccattgcagaatgcagcagcggtgcttttaaagaaacaaggaacgatatatgaggaatggtctcaaaagattgtaagtgacaattgcttatctctacttcaagggggaaatcctgagtggagaaataagatgttagaaggagctgcgatggatctcatcgcagcttctgttgttgaagaggaaaaaaagaacaaaacacaaagtcaatcggatgcacaaccgaaacctaatcatttaactcaaaataatcaatcacataaataagaaagtgggaatttaaaatggatctattcaatatttttgctatcaaattattaacttacaatgatttctttgattctgtaagtaatgcattaacatcttggtctggaaagttacaaggacttggtatagcagttattattttctgtgtatgtattattgctttcatgttcatgttcggcgaagggccaagccgtacagcgaaaaaatggctactttacattgttgttggtggtgttcttttatggggagcaggaactttcgcaagtacagttcaaggcgttacagctggtttctaagaaacacactgaaagagaagcttactaattgtgggcttctcttttgttttaaaaaaattctatatttgaaatgaggttaagagagtgtatattgtagagtttttacaaaaagaacaatcaaaagctttcaaaaagtttttaaggaagaataaagcagggaacggaaaacaactagggttaaaggcagcagaagagttaattcaaagatatattgaacaaaatcaacaatctgatcaagtgctactgttattgcaagatgttgagaatgaaaaggcatatgaatttgaattaccggtacaagtaggaagtgaattttctttactcaatgctatttcaaaagaccttgaaaaaggaacagattataacttaggaatggaaatcaaacaaggtatatatgaaagttacagagctgaagaaggtggagcagttatagaacatgaggaaggagcacctaaaaagaaaaaaggtggcttgttcgctaaattgtttggaaaaaaggaagaagtaccacatggtgataatgaagtgaaaaaagagtttgcaggtgtagaggaaaatccttttgaagaaatgcctatgcatgaattgaaaagtaggggaacacatcattttgaggatgaagatattcaggggctacaagaacacgctgctgctttagatgaaaaagaagatgatgatccatttacaattgaagaagaagaacaagatgaattacccgcaggagtgaacttggaaaaagtggctgaagaactaccatttcctacaaatgaagttgattcagttcaaagtatagaagaagagctatttagtaacggttcagacgttcagaaaacaaatcaagagcctgtaattgaagctcagaaccaaggtgtaacattccctgattatgaagaatatctgaaccttagtgaagttgagacaaagcaagaaagatatgattcacgatttactatcaagcacttactaagtcggtttggtatgagtgaggaagcaactacagggcttgaaaagaaaaaaatgcaatatgtaaaaaacgtgttaagtggaaaagattttttgctgattcaagataaatattaccaagaagtaaataatttgagagatgaaatccgtttggctcttgaaaatatttataaagaagtcatgatgcgtgattatcaaaaagaagctgaagaaaggctgcaagacatttttgaacaaggtttccaaacaaggttagcagagttaaatgagtttgagaacaaagaaatgcaagaaatgcaaaaaaaattatctgtatttactgaaaaacaaagattagcattagagtcttttaaattgcagcaagaagcagaatttacggcatatcaaacagaattagaagggcgtaagaatacgttagtaagtgcgtgtgaagaagaattaaagaaagaaaatgaaattgaaaagagaaaagcaactttagagaaagtgtatgagttgaaagtagaaggcaaaaaagaactgatcaataaaaagaacgagtatttatctgattctatagaaatgacagaacagattatgaacgctgccaatgaacaacaagaagtggggtttgcggttttagaggataaaatgaagcagttaatccctgaatggaaagaagaaattcaagcagagcacgataaagaaatgaaagaacgtcaattaaaaatagaagaagaaaagaacagaattgaagtagaagcactaaacttacaacaaagaaaagaggaagcgaaagaggtaaggagcaccgatagagaacagaagctattgaatatcatagaagatttaaaagaaaagttattaaaagctcatgctaacccagaacaacagccactacaacaaccagtgatgatgtatccgcaacctgtacaacagccagtatatatgtatcaacagccagtacaacaagctccaatacagccacaacaacctgtaatgcaacaacaaacaaaaacgtctacaaaaaaacggagaacatttttagctagactaatggactctgagtaagtggttaataaggagggaatgcgaaaatgacactattaaaattcaagcggaataagtaccttcatcataattacaatattgatggtgaagacctgccacaagaaaagaataggataaataaaaaagcactcgcaatttcttcacttgcggtgctttttcctttaggtggactaaattttgtagcaggtacgtactacgccattgtaaatgaattatcaaaaacggttgaaaagccaactatttttgatgtatttggtacggattgggagaaaggtatttcaattaaaaatgtttttcttcctgttctgcctacaaatatgtacttgtttggcttattagcttctacggtgatgggttttttggtgtattcaaaggttaattatcgaagtgacgaaaatgtagcttatggtcaaaagggggatagccgttttactacaattgaagaaattcaagaacagtatagagaaattcccgaaaagacggaaatgtttgaggggtatggcggtgttcctgtatcacattataagaacaaatattatgtcgatacagatacagtcaatacagcaatactaggggtttctcgttcaggtaaaggggaaacgattgtcgtaccaatgattgataatttgagtagagcaaaaaatcaatcaagtatggttgtaaatgatccgaaaggaggcgcgacacgttcctaagtgaaaagcttaggcactgtcgaactcaacagttcagcagtgaactgtcattttgagaagtcaaatgaaggagtaacgtctggaagggcttcccttaatcctccgacatgcaggaaagtaagcaagtactgaactgtgtgaagctcggtgaagtcggttgaaggttaccgtaaattagtatctctaatacgaaagctattcagcggtggatggtgtaactgatagaccggaggtctataaaacactcaaggttaggatgcgcgatgaactagaggcgatcgctagtaagcgcagacgaatccctgatggtacgggtctatatcgggagggaatcgaaaggttctctgacacaaataagtgtcgctactgtgggtgagtaaaactctcctttatgaaagcccatatatcgttacaggcgttattaaggtagcaggctcataggggaaacctaaaagtgtatgtacagataagaatgacggaacgtggtaagctgccgacatggagggcttgttctctttgaagtgttgccaaggaaagtcacaatgagattagttgtcgatataacttggtttaacggcagtgaaagtggtggcacagtaccgatgaaacgtgtaatgaacgtggagggatagccactagtcgattgaagattgaaggttactattggttaacatggtttcgagtaagactaagagatgtaatgctccaaagtaataaggaggttacagcccatgttaaagaaaaccaagctaagacataacgaatattatgatacacaaaaaaaagtgtatgacaatttatactcgaacagtcttaacggtaacaatttctttcaattggaaacgatggaacgccgtatgcccggaaacgggcgcgtacggtgtgaagtgggggaaaagctggagataatctcaaaggcttacctatcactataattgtatagtgcatctaaagagacattagaaaaacgtgggtatgatgttcaagttttgaatatctcagaacccttacaaggaatgtcgtataacccgttacagttagtcattgatgcatgggtgaatggcgatgaccaagaagcggctaaacgagcgaatacattaacattctctctttataacaacccaaatgctggtgataatgcattctttaatacatctgcacaaaatgcgattaacggtattattctcgctatcgtggactattgtgtgaagaataactgtattgaaaagattacaatgcacaatgtatctcaaatgctaaatgaattaggtactttttattataaagagaagcctgatgattttaccgaaaagagcgcattagatgaatattttaagagtctaccgcaaggtaatgtcgcaaagatgcagtatggatcaactagctttgcaggagaaaaagcaaaggggtctattctagcaacagccaatcaagggttacaaacttttgcggataaaatgtttgcaaaaatgacttcgaaatcaagcttggatttaaaacaagtaggttttcctaaaaatctattttttcagttggatgaacgatttttgaataagcgtgtaacggtatcttttcataagaataaccaagaaaaaacggaaattttaagctatgaaattaaggtgaaagccttaggtatgtgcaacatgaactttgatgaatccctagaagatggggatttattactaattcgttatcaagatgtagaaaaccaaaaaaagaagtacagattattttatagcttacagtttgaaaaactgctagatgaaaaggggcaagttgtttatcaaaagaaagagggatgcgaacataaacctgagtatcagcgtcaagtcacactgattttaaaagctaatacttttcctttacaaccgaaagcgaagttatcgtattccaataagcctacagctgtatttatgatcgtccccgactacgataagtcgaatcacgcactagcaagtatttttgttaagcagctgtatacagagctatcgatgaattgtaatgatacaaagggtaaaaagtgttataggcgtgtccatttcttactagatgagtttggtaatatgccacctattgatgatatgggtggggtattaacggtttgtgctgggcgtaatatgctgtttaatttggtgcttcagtcatactcgcaaattgagaaactatatgataagcaagcgaaagaaatcaaacaaaactgtcaaaatcatctttatattatgtcgacagatcctgaaacaattgaagaaatttcaaaacgtgctggacatgaaactattattggaaaatcttccaatgaaagtcacttggatacagataacaaggtaacgaaaagtgcagaccaacaacgtatcatctctccagatagattatcacaatttcttgagggagaaactttagttattcgtgcattgcatagacaagatttaaataggaaaaaagtgcgaccatatccgatttttaatacacaaggaatgacaatgccttttcgttggcaatttctatcgagcttgtttgatacttcaaatgatttaaatgatattgatattccttccttacatacaggattagatttaacagagctatacctaaacttcttggattttatattaaatccagttgcgaaaaaggaatatattaaaaagcaacaagctaatcctgtagtgaaaaaagagcaaacagatattaatgaagcgattaaatcgctcattggtcttgtgaaagagaaaagaaatagaaacgacactgaagatattcagaaacgacttgtacaaatgctattagattatgcaaaacataccatcgttccaaagacggaagaagtgaagtttttaaaagaacattcttcagatgatgaaatcaagatgtatttagaaaaaatattggacatgttggtagagtaattgatttgaaatcaagcagaaaggtagaaaagtaatggctactatgaaaataaaagaatggatgttacgtagtaaaaaatctttagttctagggattttagcagtcgcaatgctatttggaagtttcacgttcacaccgattgcgtatgcttttgattggtacaaatttcttggtctgaaagatgtggatacagaaaaagcaattgtctttttaaaaaatgagtggatacaatatgctgattttttaggttctatttggcaaacaattcaaggagggataataaagacattactctatatcgtatcagcgctagaaggactaattcctgacactttttctttttttgatgtgctaaaagatgcaggattaaatgactttgcatcatctattataaagggtttattctatgccttattcgtattagttgtcgtatggttagggattagaacaattattcagcataagcccccacgttttaaatcagtaggagttaacattattgtaatgattggcttactaggtggattaaatgagttgatggcggatatgcagaagatatccactgatttcttttcggaaacgacaaacactagtaaaacaaaagatggattggcttgggatttagtcaagcagaatacagctgatctgatttatttaagtaaaacaggattcgatccaatacgagggaaaaaggaaaatgaaccagcaatttcatctacagataataaaccgaaaaatggaatgggaaaggaagtcttccttcaagcaaatttgggggatatagtgacaccagagtctatagaagatttatcaaagcaggatggaattcctgaagaaacgaaatttttatcttataaaattacaaatgatggggataaagaagtaatagaagaaataaagaatagtgtgtttaatccatttaaggataaatttccagggggctatgttcgttatccaatgaacttcgggactatatttttggggttattagctctaggagttgcttatttatttacagttttcgtatttgtgatgacgatatttgaaattgccatgaagaaaattattgcgccaattgtattcgttacagatattgaaacgggcgaaaaaacaaaaatggtaatgcaggatatctttaaagggttcttaatatttgcctttacaggtttaaatttaagattctatacaattatcgttaactatttagcagagaaaaacatcaatgcgtttttatatatcgtagcaatggtttgtttaactgtcgcattaattaaaggatcagaatctattttaaaatactttggtgttgatgttggattaaaagaaggaaagaatcacttaatgggtatggttggcggagctatggcagcgaaaggagctgtgaagggcgttggtcgtatgtttagtggtgcgaagaacctaatgagtggtggaagtggacaaacacgagaggatacgcctaaacgctctgaaatggactcgaatcatgagagtgctgatctacatggagaacaaaagaataatgctaaaggcggcggtatgcaagcgaagaaatttgctagaaatacgggcgctgcgttgagttatgctactaatcgtggagttggcggcatgatgaatgatgcaggaaataaagtggctgagactgttggtggcgctgttgataaagggaaagaaaaagtatcaggcgttgcgaaaggcgtatcggacggtgtgaaaggtactgtaagtgaatttaagagtggtcaagagcaaggtaaagaaaaggcacaagaaaatgctgatcgtcaaacactaaatacaataggtaaaggtattcaaaataatgcaaatgcaggtatagagccatctgctagccctaagatggctaatcgttcgaatgtagcttctatttcaaatgaagggcagcaaggcaatgtaaaaggcgaaagacaaacagcggaacgagaaatcgaattacaaaacaaactaagaaatacaggaagagaagaatcacagcaaggcaatgtaaaaggcgaaagacaaacagcagaacgagaaatcgaattacaaaacaaactaagaaatacaggaagagaagaatcacagcaaggcaatgtaaaaggcgaaagacaaacagcagaacgagaaatcgaattacaaaacaaactaagaaatacaggaagagaagaatcacagcaaggcaatgtaaaaggcgaaagacaaacagcagaacgagaaatcgaattacaaaacaaactaagaaatacaggaagagaagaaggacagcaaggcaatgtaaaaggcgaaagacaaatagcagagcgagagattgagctacaaaataaattaagaaataccggaggtactgaagcatcgcaaggaaatataaaatcagggacacaaacagtacagcgtgatgtgaacgttcaagatacattaagaaatacaggtggaacaggaacaatcaatagtgatgcaaaagcaggtgtagcaacagtacaacgtgatgtaaatgtacaaaacaatgtaagaggaagtgaagcggtaaataacgatgtaaaagcaggctcaaccacggtacaacgagatgtgaatgtacaaaacaatataagaggaaatgaagcggtagagcatactgcaagggcaggagcagcaacagtacaacgtgatgtaaatgtacaaaacaatgtaagaggaagtgaagcggtaaataacgatgtaaaagcaggctcaaccacggtacaacgagatgtgaatgtacaaaacaatataagaggaaatgaagcggtagagcatactgcaagggcaggagcagcaacagtacattaaagaaaaaatctaagtctgaaataggacttaaatattaatatacgaggaggaaaatcaaatgaaaaagaagtttgtacccggtattgcatcagttgtaggagtaagtattttattaactggttgcggtagttataaaaacgaagcaagcggagcaaatgcaaaagacgaggcacctagtaaacaggttttaaacttatcttcacctactgaaatacgaacaatggatacggctcgtgctacagatactgattctggtcaagtaatgagaaacgtatttgaaggtttgtataatcttggtgaaggtaacaaacctgttcctggtgttgcaaaatctcatgaagtaagtggcgataaaacgaaatacacattccaattgcgagattcaaaatggtcaaacggcactcctgttacagctaaagattttgtgttcgcttggcaaagagccgtagatccagcaacagcctctgaatatgcatttctattctttgatattaaaaacgcaacaaaaattaacaacaaagaacttccagccgaccaacttggtgtaaaagcagttgatgaccatacgtttgaggtagaattggagcgtcctgttccgtattttattagcttaacagcgttcccaacatttctaccaattaacgaggaattctttaaagcacaaggtgataagtacactttagaagataatacaatcttgtacaacggagcttttacactaagcgattggaagcacgaacaaagctttaaattcaagaaaaaccctacctattgggataaagatactgtcaaactagaagaaatcaattttaacgtcgtaaaagaaaaatcaacagaagtaaatttattcgagtcaaaacaattagatcgtataaaactaacatctgacttcgtcgataaatataaaaaggatgctaactttaaagaacgtccaaacgtaggcgtacaatttttacgtatgaatcaacaaaacaaagtgcttcaaaacgtttctgcacgccaagcaattgatcaaacaattgatagaaaatcctttgtaaatacgttattaaatgatggatctacaccaacatttggtctcgttccaaaaaactttgcaaaaggacctgaaggaaaagacttccgtactgcaaatggcgatttaacaaaagttgatacaaaatctgcacaagagttatggaaaaaagctaaacaagagcttggttctgaaaagataacattagaattattaacgagtgatgctgaccttgataagaaaactggtgaattcttaaaaggacaactagaaaagaatctagatggattaacagtaaatataaaaccgcaaccgcgtaagcaacaagtttcgcttttattaaaaggtgactacgaaatcggaattgatggctggagccctgactttgcggatccaattacattccttgagctatttacaacgaataacccttataacttagatcattactctaataaggaattcgatgaaacaatagcaaaagtgaaaacaactttagctggtgatgaaaaagctcgctgggaagcattactagcatccgagaaaatattatttaaagactctgttatcgctcctctttaccaaaaaggcgaatcttatttagaacgttcttatgtgaaaggaattgtgcaagtagactttgcagggcaattaaacttcaagtgggcaaaaattgaaaaataaagtgaaactttaataagtgggggtttcttcatccccacttattattagcccacaccaattgtttttttagcaaaatatattaaaaataggttctctcacacatgagaatccgctttttcaatatattattctaagaaattaacaatctatttttattattgacatatagttctttccagtgttaatattctaaataatcaaagaaacgaaatatttcaccatcaaaatataatgtctactacgttgaaacatataacgatagattatagatcaacatgtatatacatatagaacacctgattacctataaacaaatatttataataggttttatctccttctataactacttcaagacatggacattatgacgttacgaacaacacatttagggaggaacgaacaatgaagaaaaaagttatacctgttgttgcatctgttttaggggcaagtctattactaactgcttgcgggggaaataaggataatgcaagcggagcgaaagcaaacgataaagcacctgataaacaggcaattaacttatcattcgcttcagaaattccaacaatggatgttgcaaaagcaacggatggggaatccatgaacgtaatgcgcaatgtttttgaagggttatatgcaatgggagaagataataaaccggttcctggtgtcgctgagtcggttgacattagtcccgataaaacaaaatatacattccatctgcgtgattcaaaatggtcaaacggtactcctgttacagcaaaggactttgccttcgcttggcaacgtgccgtaaatcctgatacagcagctgaatacgcattcttattcttcgatataaagaatgcgaaacaaataaaccaaaaacaattgccaattgatcaactaggggtcaaagctgttgatgacaaaacgttagaagtacaactagaccgtcctgttccctacttcttaagcttaacgacattctcaacattcttaccaattaatgaagagtacttaaagtctcaaggcgataaatatggtttagaaacaactcatttaatttacaacggtgctttcacattagagaactggaaacatgaacaaagcttccaattgaagaaaaaccttaactattgggatgctaaaactgtaaaactagaagaaatcaacttcaatgtcgttaaagataagtctacagaagtgaacttatatgattcaggacaaattgatcgtgttgctttaactgcagagtttgttgataaatataagagcgatccaaacttcaaagaacgcgctgaagtcggcattcaattcttacgactaaatcagaaaaatgaaacattaaaaaatcaacatgcacgccttgctattaacggcgcaatgaataaaaaagcttacgtagaaacaatcttaaataacggcgcggttccagctgaaggaatggttcctgcgaaattcgcaaagagcccagaaggcaacgacttccgtaaagaaaatggaaatctagtcaaggatgatgtgaaaacagcgaaagaaaactggaaaaaagcaaaacaagaacttggtactgacaaagtaacaatcgaactattaacaagtgacaatgctttagctaaaaagactggtgaatatttaaaaggtgaattagaaaagaacttagacggattaacagtgaacttaaaaccacaaccacgtaaacaacagctaaaactactattaagtggtgactatgaaattggtattgacggctggggccctgacttcgctgatccaattacattcttagatctatttacaacagatagtgcttataacttcgataaatactctaacaaagagtacgatgagctaattcataaagtgaaaacagatttagctggcgatgaaaaagcacgctttgaagcaatgaagcaagctgaaaaaattctattacaagacggcgctgtcgctcctttataccaacaaggtcgttcttacttacaacgctctttcattaaaggacttgtaacaactgacttcggtggtgaatttaactacaagtggacagaagttgcaaagtaacaaaagtaaaaggtatcccacgaaggatacctttttacttttatacaactttaactacagagcttcctcttccctttgccattccttttatagctaaaatcatacctgctactaattgtataaccaatacaataactaataatgaaataatatttctttctaaactaactcctccaaatattattgtataatagccatttcctgcatatattgcaggaaataattcactgattgtttggtatgttttagaaagcatttcatgtggtacaattacacccaaacttacaagttgtaacgatagtgagatgatattgaaaatcatacctgcatctccaaaaacagttacaaccatttgtgttaatgaaagaaaggcgaagaagactattgtcaataatcctcttttccttctttttgcattgaaccaaaactcattatacatataaacacaaacatcaaatatgttctccacgtcaaagaaggtatatgccctgaccaaagatacctaactaaataattaactcccataatacaagacgatattactaaacaaatacttattagttttacatatttgagcatatcttttctccttattctttatttttctacttcttcaaattgtagattcaccggctcttctaaaagtgtttcataaaagttctctgccaaatctgttgaaggaattttttcatctacttcatcaaatcgaatactatctagccacacacaaccttctcctgataataaaacaccaaatgcaataccaagtgcttcttcttttatatctaatacaaccgagtacgattgccagttattcgtatttttaatggggcgattttgcatattatccatagcgagcgattctgtatcttttccatctactcgcatccacaatcctgcccaatctcttacattttcactcttaataaatgctgtaaaacgtaatctctttcctacatatttatccgctcggaacatttgcattaatgttgaaaatcctccgtgcgtaacattctcttttgcttttatgtatgcagatactttcccctgatggacaacttcataatctaaacccatctcatattcagcaggatgacttccacttaagatccatcctttcggtatacctttttgcattgaaacaccctctctttctatataaaatgactgaaagtactttcgatatttctttggtggcaattgaaacattcttttaaaagctctcgtaaatgcctcttgtgaggaaaaaccgtattgcactgcaatatcaataacagctctctccgttgacactaaaacttgcgcagcatgagttaaccttctctttcgaatataatctgttacactcatcccaacatatctttgaaagatgcgatgaaaatggtacatcgatactgcactgtgagatgccactctttctgttgtaagctcctcatgtaagtgattctctatatattcaattgatttttttattatctctttatattcttcatgcattttagcccctcctcacaacttcaatttaccatatacatacaaatcttttttgatttaaattgcggattagcccttgcaactacagaataataatttattttcaacacatacataattacatgtttttgggaaaaacttgtatagaacgaatttacataaggaggaatttataatgagaattctactatcagttttattagctcttatgctagtacctgcattaacaggatgtaaagctcctgcaaaagaagacacaacttctaataaaaagacgactgaagaagcaaaaaatgaggctcctgcagatttaaaactaaacttcaatgaattcgatttaaaggcagactaccaagatacaaagaaagactacgaagcagactataaaaatgtagcagctgataagaaaatggaagcaaaaattgaagatcataaagcagatgtaaaattaacaggagacgaggctatcacaaaattaagcccactcttacaagaattaaaatttgataaaaatactgctgaccaagaagtaatcgatcaagtagtgaacgtgttcaaacttgataaagactatcaaaaatttgatttagaagttgtcttctctgatggaacgaaaaaagaatacaaaagagaaataaaataaagaagtaggcggtagtaagaagaaaaaataaccttgcacaggcaaggttattttttcgtttctgcttgaaaacgtttatagtatgtcgatgctgttgcaaaattaatttctatatcacgaatcaacgatgaatcttcttctttagctaacttctgtaattttttcatcgcttgttccgattcattcaagaaaccaacatatacttcatgttcttgctctttcgacttcggaacacgaatttctttacgtatatgatcaatatcttctaacatgctcgttgttaccttttgcacatcttctttatatgtagcagtcgttatttccttaccgcccttttcttttgctacttcaaataactgcagtgctttattaatttctttattcattttcatatcgtatttttcatgtactgcacggtattctttcatctcttctgtttgttctgtagattgctctaccttttctttcggttctttcgtatctttatttccattacaccctgctagaaggagcattcctcccattacggcaatacccaaaaccttcttcatctcttcttctccttttatctacaactattactcattatagtttcttttatctccacttgttattataccgagaacatcctactttttacacttaagacgacaccgtaatatatatataccaacatgtttgtcacagtatcgtcactttatacaaataacttttgcaatgctttactacatcaccttacaaaactgtatgaggtatttcaaagaaatgaaaaaagaactgattcaaacattccctttgaatcagttcttttttgttaagcctctagattttgtttttgctgcagttcaaactgtttctcacttcttctggccataaatagataacataacactgctcctacttcacaaagcgcaataacaatacccatcggtaatgctgtattacttccaccgatacctactagcggagcaacaagagctcctgaaataaactgtaataaacctaataaagctgatgctgttcctgcagcttgtttctgatttctcatcgctaatgagaacccagttgttgatacaaccccgacacttgatacgacaaggaataacgaacataaaacaccaattaaacctattcctagtacgattgtcagtagtaaagataggccaccaacagctgcgataataatacccgcaacaaataatgtcttctcattcactttccccgctaaacgacccgttacctgactagcaataataataccgaggccattaatcgcaaagaataaactaaattgctgtggtgatgctccgtatatgttctgcaacacaaatggtgagcccgaaatgtatgcaaacattgccgctgttactaatccttgtgacaatgcatatcccataaatagacggtcctttaacaattttccgtacgtcgccaaagtccctgacaaaccacctgtttctctttcttcaggaggtaatgtttcacgtaatacaaaagtagctgagattaacatgaatacgctaattgctccaagaacgatgaaaacaccgcgccacgttgtaaactgtaacaattgccccccaataatcggtgccaaaataggtgctgctccgtttactaacataagcagtgagaaaaacttcgtcatttcagaacctgagtacatatctcttaccatcgcacgtgatataacaatcccggctgatcctgaagctccttgtaggaagcgcaataatactaatgtccaaatagatggcgcaacagcacaaagtaaagaagaagcaacataaataataagagcaataataagtggtttgcgtcttccgtaaatatcactaattgagccaacaaataattgccctactgacaacccaagcaaacaagctgttaatgtaagctgcgctagggatgcacctgtttgcaagtcatccgttaacttcggtaatgaaggcaaatacatatcaatagataatggcccaatcgccgtaagtgtccctaatacaagaatcatccacaacctgtttgcctttacaggtttatatatttcgtgattaacttcattcactttttcaattcaccctttcctatacacactgaatcgtaacaattatagttacatcataaacatacgtcaagtacagtgcattttcctctttcataatgtaaaaaaagcgatagaaattctaccgctttattttttcacattgctattcgtaaatttagataccgaggccatcgtctctcccgtatctaaatatgtaatttgaattggatctcctacttctgtaaacatagcatatgggaatttcttcaccggtatcataaataccttttgttcattttctaaaagtacgtacacgattgtattttcacctgatttttctttatatacacgttgtacaataccttctttttgcgcttcttttcctgttgaggttggtctaaatgtatcaccattaccgctcattacgtttttataattctcaagcgcttctttctgcgaagaacctgtcgcaaatatttttgcattagcagcatatacaactgtatgcgcacgtactaggcctccgtcatcaacaaccggaataatccaagctggtttaccgtatacgttataaatgacaggcattgtcccatgccatttctctctcttaaaggaattatctactacttctgtagctgctgaaccatccataatcccctttacttcttttccattatagtaatatagcttgcctgtgcgtgcatctactaatgaatagcctagagctgaatctactccttcttttggagaagtaaagtctgtaaaataatacagtgttccatctttaccaaagatcggggtcacgccttctttcgttccccactcagtcggaattttcatatctgtttgcgagaatttcgtattccaaaatccgtgaatatatttgccaaagtacgtatttaacgtagatgcagtctcatgatttaatacaccatcaacaaatttaggtgcctttcctttatcatatcttttcacttcacctgtttgtgcatctactacgacaacaccttctacctcaaatccagatcttcctgaaataaattcaccatacgtcattgtataatatggttttcctttatcatcaacctcaaatttaggttttcctttaaagattaaatttggttctgcttgccttaccacacgctctaaattattaccaaaaaacatgcttggcacatatttcattttataaccgaggtgcagtttcgcttccgcatcaggattcgtacctgacatcgttacgtaccctggaattgtctcagctttacgcgctttaaaaaatcctgaaacttcaatcggcgctacatataaagcctcgccgtttaccatttgtggcgttaattctcctagctcaaaataagctacttttggaatatcaccaaatacttttttcatcttattctccgctgtctttggcggcactgtaaacggctggtcattttcagtaaatggctctgaaatatctttctctaccttaacaacagaatcatatttcttttgcgagattactatatcgtgcaaataaccaaagtagccgtaacttgcgagtaaaataaacattagaagtccttttaatgtaccttctaatttccctatttgatcttgtgaaaataaaacaagcccaattaaaattgctactgcaacagaataatgagtaagaatcgaatctactcgatcatcaattagccaaaagtattcatagattgcaatacctatccaaaataaaacaggaataactaaaatagatgatttcttaccctttacaaccttcttatctcccttcttatccactgctcgaagcttactactacttcttgtccatggaatcaaaaacaaagtaagaatagctaaaactacaaatttcatcaaaggcactgtccccttttcttttgtattcccttttagtataacaaataaaggttattaaggtgaaaataggaatagttatatttttttactacttaatacaatcccgctcactacatatagaatagatgcaatataaaaaattgtaccaatcgtaaagaaatctactaaatatcccgtggcaataaccgctactgctccgccaatggatgtccacacatggtattttccaatctcataaccagccttttcctgcgcaacctttcgtgctaacgaagtcttctcagtattacgctgcacagcacctaaaacgcccattacaatttgaagaatatacacatgccaaacttccgtggcaattggaaagcaaagcattaagattgccatggaccaagcgtatatgattaataattttttatcccctacttgatcagatacctttcccactagtggatatacaagtgctgatgttaaagcaaataagccatacgcccagccaaattgcgagaagctatttccaacgtttcgaagcaataatatataaaaaggaaataccatacttcctgccatcatgatgatactttgcgaagccacaaatcttctatatgtcatttcgtatactccctataaaataaattcacaaatctctcttctgaatctatttccttctttttcttgagaaattcttcaatgcgaggatatgccctctttaactgctctttcgttggataagaataatacggcaaatagtaactaccattatgctttaaagtaacatcaatcatctttcgaatgacatcctctgttttctttatctcactctctgagcgtccctggttaatcaaaagaaccagcgcaaacatatcatctttcgcataggacaaaactgcattttcattcttttccacgtaacgaatcgtaatgttgagtaaattaaactcatcttcatttaatacgttacgtaaatcatctatatactctgtgaaagcatctataggtacaaagtattcttgtaacacttcggtcctatttggattttcatattccataaaagcactatctgatctcataacattattacgcgtctcatactttccatctgtacgttcaaaataacctctttgtatatcccaaaatgtattctttccccaatcactataacgtgataacccaagcaaaaatttcggtgcagctataatattttcttcctttaattcactgtactcttctctcatattttgattttgtgccaaagtataatctgtcacatacatctcttttaaaaatgaatttggagcaacagaaatacgcgctaagtgcatacgaacattctcatctcttttcactttctctttgaaataagatgcgtattctttataatctatcattctcgtgtgcatttcatataattcatcatctgttaacttcagcgtcacatctaaaataactccaaataaaccgtaacccccaatgacatatggaaataactctgcattttcttctctacttacattacgtaccgtgccatctgccattaacaatctaaatgaatctactgtatcaatcagtgcctcatgacgaatatcacgcccgtgtacatttacacttaatgaaccgccaacagtaaaaatattttgagactgcatgacctgtaccgcaaggccataaggatttattttcttctgaatatcattccaggtgacaccactttgaactgtaatccgcttcttctctggatcaaattctaatattttattatatcctttcatatcgagcatcgtgccattcggataatatgtctgtcctccttggctatgttgcatgcctgcgatggaaattttctctcctgaaacttttgcatctcgcactaattttattaacgagtgctcttccgtagcactttcaacacgttttatttttgtcggaagcaatttacctacatcactcataataggatgatcaatttgttttttatacgtatgtacagacgttgcaagcaaaaccgtatatgcgacaatgaccactgctatctttctttttttcaaaggacactctccttattagcaacaaaaagagataccctttctttcaggtacctctcttgacagtgattactttgctgctggcaattgtattggatcaaatttatcatacgatgtaaactttgcatccgtaataatgtgcgctttatcctcaccattgctactcataaccatatctatctttgctgattcatatttaaaatcttttgtaataatatattccccatctatttcttctatctttgcattttggccttgtagcatttttttctgcttttcatccatactagctagcatactctctgtctcttgcccttttaatgcaaacttcagcttataattatctccacttttctccatcttcactttatttaaaatttccgatggaatctctaaattatctaccattccttgagtcgcgttcattccgttagcattcaattgttcctctggtacagacataatttcacccgtattaggatttttcaactgaccagcaattttgccacccacatcataaacaacaacctctgtaccagaaacattcatttcagaacgagaattttttttcttcggctctagttgcattttagcctttattacattcatctctgttccttcagcctttattcccacatcatatgtcatcgttacattttcttcgtttttaaaagcttcattcgctttattaaaaacatccttcgctgttaattccttttctttctgcacagcttcttttttcggttcgtcagtcttttttgttttctcattactacaccctactcctagaccgactgcaagtactaaacttgaaattaaaataagttttttcataacgtcccctccttcccaaaaataatatcatctcttttcctatgaaatctatataattcgtaatatttatctttaaatttatttcctatataacaacatgtttgagaaaaagtttaaatatgatgtaaataataacaactcatttcaggaggtcattatgaaagcgattatttgtacaaagtacggaccacctaatgttctccagcttcaaaatgtagaaaagcctaaacctaaaaaaaatgaagtgttagttaaaattcacgcaacaagtgtatcgactggagattgtagaatacgtggctttaatagccccctcttattttggattcctatgcggatcatattaggtttcagaaaaccgagaaaacctatacttggcgtagagttatccggtgaaatcgaagacattggaacagatgtaacacaatttaaaaaaggagatcaagtttttgcattaacagaactaaaccttggtggttatgcggaatacacatgcgtgcatgaaagtggattaatagcattaaaacctaccaatgtgacatatgaagaagctgccgttattccttttggcggaacttcagcattgcacttccttagaaaaggacagataaaaaaagggcaacgagtacttatatacggcgcctctgggtcagtagggacagctgccatacaacttgctaaatacttcggggcgactgtcacagccatttgtagtagttcgaatttcgatttagtaacaactttaggggcagacaacgtaattgattatatgaaagaagattttactaagcggggcgagcactacgatattatatttgatgcagttggaaaatataaaaagtctctttgtacagatgcattaatgcctaatggaaaatatgtatctgtgaacggaatgatggcaaaggtcagtaaagaagatatgaacctgctaaaacaactagctgaaacagaaaagctaaaacctgttattgatagaacttaccgattagaagaaattgctgaagctcatatatatgtagaaaaaggacataaaaaggggaatgtttcgattatcttaaaataaaatatattccgaaaatatcattgacaattctttttgtacgatttactattagtaccatattcaaaactacatacacatactcttatcaagagtggcggagggactggcccgatgatgcccggcaaccgagcttatgacgtataagctaaggtgctaattcctgcaaaacgagttttcgttttggaagataagagaggaatctatttcgtctattcggcacctctcttatttttgggaggtgctttttattttggaacgtatatgaagggggatttatagatgaaaaaggtattattaagcattgtaagcggagcagtattattattaggcgcatgtagcgtgagttcagataaagaggtaaaagcattagacgagaaaaagattactgtcggtgtaacaggtggaccacatgaacaaatttttgaaaaggtaaaagaagttgcagcaaaagatggtctcgaaattgatataaaagtatttaatgattatgtagcgccaaacgtatcattagatgaaaaaagccttgatgtaaatagttaccaaacgaaatcgtatttagatgtatttaaagctgaacgcaatatgaaattagctgaagtattttcaacagtaacattccctatgggcgtatattctaaagatataaaagatgtaaaagacttaaaagagggcgatgcaattgctgtaccaaatgacccaacaaatgaacttcgagctttaaaattatttgaaaaagcaggggttttaaaagttgatccaaaggctacagaaaaagcgactgcaaaagatgtaattgaaaatccaaaaaaattaaagattgtcgaattagaggcatctcaattaccaacgcaactaagtgaagtgaaagcagctgcaattaacacaaactttgcattaggtgcaaaattaagtccagcgaaagattctatcttccgcgaaggaaaagattcaccatatgtgaactgggtcgttgttcgtactgaaaataaagatgatgccgttgtaaataaattaaagaaagcttatcagtctaaggaagtaaaagagtttatcgagaaaaaatttgatggttcagttttaccatcttggtaggagctgacgataatgattgaattaaaaaacatatccaaagtatttacaacaaaaaaagggaatgttgaggctcttaagtctacttcccttaaagtagaaaaaggcgagatatttggaatcattgggtatagtggcgctggtaaaagtacattgattcgatgtgtaaatttattagaaaaaccaacgacaggaaatatcattgtaaacgaacaagacttaacaacgttatcgacaaaagaactagcaaaagcgagacaaaaaatcggaatgatcttccaaggattcaatttacttaaaactgttaccgtttatgaaaatatcgcattaccgttacggcttgctggcattccaaaagcagaaattgaaaaaagagtagaaaagtatttacgcattgtcgatctttttaatcgaaaagatgcgtatccaagcgaactttctggtggtcaaaaacagcgtgttgcaattgctcgtgcgctatcacatgaacctgaagtgttattaagtgatgaagcaacgagcgcattagatcccgaaacaaccgattctatccttgatttgttattaaagattaacgaagaaatcggaattacgattttactcattacacatgaaatgaatgtcatccagcgtatatgtgaccgcgttactattatggaacatggatctgtagtcgaaagtgggactgtaaaagatattttcacaaacccacaacatgtaaccacgaagaaatttgtaaatagcgcatttgcagcgaaaattccaaaagaggtacagaaagaactacaaagtactggagaaattgtaacactttcatttattggcactacttcaggggaacctgccttagccgttgccacaaaacgtttccaagtgtatccgaatattttatccggtaatattacgcagttaaaacatgaagcatatgggaaactagtcgttcatatgcaaggggaacaaaatgaaatccaccgtgctttatcatttttacaagagcaaggaatcatcgtagaaggaggtagaacagattatgggaaacaagtcctttttggatgaatggggtaaagtcatatgggaagccacaatccaaacctttcaaatgacatctatctcattactcatctcgatccttattgcattaccacttggcgtcacacttgttttaacgagacctggtgggcagcgtgaaaataaaatcatctatcctattcttaatacaattattaatatcattcgctctcttccatttatcattctattattctttattttaccttttacaaagtttctaatgggaacgtccattggcgtgcaaggtgttatcgtaccgcttgtcgtcttcacagccccttatatcgcacgtttaatggagacagctttactagaagtcgatcgcggtgtcattgaagcctaccaagcgatgggcgtttctactataaaaatcatttggcacgttatggtgaaagaagcacgtccctcccttgtactcggattaacaatcgcaacgatcggcttaatcggcgcaacagcaatggctggccttgtaggtgctggcgggctaggggatttagcataccgcttcggacatttacgctacgagcctgaagtaatgtatgcaaccgtctttattttaattatcctcgttcaaggattacaatctttagggaatggtgttgcacgaagattgaagaaagattaaaaaagaaggcatctcaccctggtgagatgccttcttttttatcttttaaatccaccttctgaatgaataacttgcccagtaatccactcggcctcttcacttactaaaaatttaatgagtctagctgcatcccttggctcaccaattctgccaaaaggaaacatcggctttaacccttgttttatctcttcagtcatccatcctgtatcggttggtcctggattaattgcattcactgttattcctaaatgagctacctctgctgacaacgtactagtaagagcatcaatagctcccttcgttgtcgcataagctagttctcctgccataggaccttgaaattgccccgaagtaatattaacaattctaccaccagatttcttatcaaatccccgggaaaattgactactgagcaatgtagtcgcacgaacatttaccatataatgcttatctaattcttcagcagtcaacgtagagaaattattattcgtagaatatgctgcattattaattaatatatgagggtaccctaattgttcagtaactttatttataagctcttttggtgcatcattctgagttaaatctaactccatacttgatactttaacaccgttttttagtaactcttcttttaattgtatttgttcatttttatcaacgccccaaggcatctctttatcgtaagctgtccaatacgtaaaaaatatatcgtatcctgattcagctaattctttacaaatcgctgcccctataccatctagacgacttacccctgtaataactgctactttattttttaattggttcatcatatactcctccaagtttaaaggacgcatattttatataagagatataaactttcccacaaaaaagacagatacataaaataggcacctatccttataaaagggatgtacaagccaaatatgcattccttgaatgatttacagataactaaataaaccctcgcttatgagagcaaaatttatctatctagtagtttctaatcattacaagttcatccacatattgagtctttgtctcctttacatatatctctattcttagtttatcaaagcagataaaatgttacaaaaaataaaacaattattcacaacctatccttgttcacattctctccattgtgaatcttttcacattggatatataataaacgtgtaaatacaatattggagggatttcaatggttatcaattttttaagaactgataaacgtgctactttcatattattacttttacgactttacataggatatacatggttcgctgctgggataggcaaagtcttcggacaatcttttgacgcaagtggctttctaaagggtgctattgctcaagcatcaggggaccaccctgcagtacaaagttggtgggcagatttccttcaacattttgtccttccaaacgcagacctatttagctttttagttcaatggggagaaattttagtaggtctaggtttgattttaggcggattaacaaaaacagctgcatttttcggaatcataatgaatctttcatttttattaagcggaactgttagtgtaaacccaaacctgcttattttgactatgttcattttagttgcagggcagaacgctggacgtattggattagatggctatgttttccctaaacttttccgtaaaaacaaccacagaacatataaattaagtaaaactgcgtagtaacaatttacttttaaaatataaataagaaaaagagcctgaatataggctctttttcttatttatcctaatttaaacttttaatgaaccacgaaagcctctggcagcatagtaagagtctgctccattgtggtacacgaaaacatgtccaaagcgataatcgcaaaatagagcaccaccaagctctctaatatctgaaggtgtttgtacccaactcgatgatttcatatcaaaatctccaagttgttgtaactctcgatattgttcttccgttaataactcaatacccatagcggccgccacatcaatagcgttattttctggtttatgcttttttcttgattctaacgcttcaagatcataacaaagacttctgcggcctttaggactctcctttgaacaatcatagaaagtatattcgtccttttcttcatcataaccaataacatccggctcaccaccagttacttccatttcgttaagtgaccacaatttttcattattagtagtcagctttgcttcaactttagcccattcaagaccttcatggcggttcatgtttttctcaaaacgagcttgcaatactttcaataactcttcacgtttttctactagtaagtcatttttatttcctgtcatattagtcctccctgatgtatgtactgatagtagtttaagtatatattttataataaatcatctcaatatgaagaccgtttcaatcatatgtcttgtacaaacatctattacaaagtcctaaaaccctccatactctcttcaagcatatagtgtgaaaaccacatcaagttctgcttcataatagccacatgaactcctggttggtcagaactatatgccattcctttaaatataattaattctgtatcaacttccatatccattaatccttgatatagatcatatgcatttgtaatcggaattcttgcatccttttccccatgttgaattaaggtaggcgtacaagctgatttaatatacgtcataggtgatgtcttcgtatatatatctggatcattccatggagtatttcctaaatacattctaataaagtaaggtatatctgtatttacataatgggtactccagttagttattccaccgccaactgaaatagctttaaacctgctactaaatgtagaacaaaaagctgataaatatccaccgttgctccatcccataactcctactctatctttatctactatcccttgatcaactagtttatcaactcctgatataacatcgtcgtagtcagcaatcccctgttttctatagttagcttttaaaaattcattaccataacctgaacttcctctgtaatttggctctaaaacgataaagcctttttcaacaaactgttcaatcggatatttctcattgaagcagtctgaaaatatcggaaaagatgcccaagccggaccaccgtgaattactactaataaaggatattttttattagtgtcaaactctactggcgttgataaaacaccttctatttcaagaccatcactacttttccatgagatgatttccctgttacttttaagtttccctttgaaaaagctattttcatccgttatttttttatcgtctaaatagatttcaaaggtttcatttgttatagccttattataggttatatgatttccatcctttgttatagaggcatccattataaagccatctatcttgtcgcttaatgcttccacagtgccatcttcagctagtaatccaatacgataattcgttttatcctgccatctaattaaaattcctttagctgtccactgtaatggcataactgtactatcaaagtttgttagaggctgaattacctctccagtattcatatcatatatctctaacgtactatcttgtatatggtttctatagtaatccttctctcttatgcttgctgtgtaacatattttactgccgtcaggagaaaagcaaacactccctcccaacaacttatccacattcagcttttgtagctctccagctttaatatggagtatgtatagatctccatttatataatctgccatatttgagcttggtgtcgttataaatacaacctttttaccatcatttgaaatatcaaattcatggatatgaaagtccttaccatccgttaattgataaacaactctgttctcgtgttcatctgtatcactttgtatcaccttttctatttcaatgtaatataaacaatcattctggtgttccttacctatatgttgaaaatctccatatagctccttacgtttctttatctcttcacattcttttgactgcgtaacataataaagccccttgccagtaggaccccatttgaatgtactgactccttctttctcatcagtaatttgaacctctctataatcatctagtgacttaacaaatatctgattttccccgtcaccaactggactaagatatgcgatacacctagcatctggagaccataatgggtgtgtactatctatatcaccatttgataatgggtaactctgcttcttatctttttcatatatccatacatgattcctatatgtattgtctttccaatcagccgtcttcttaacaaatgctacgtttttaccatcatcacttatgtttgtacttgatacggttggtaatgaaataatctcttctatacttaaatatgtttttgctttcactttcatataataagcccccttgtaatgtccatgaatctaccgtctcttcttgtcgtaataaaggaaattgttcacggatacttaaaatagtaacggaaaattcagataaataaaagtgaatccgataaagtaaaactttaatctatagggctctttccgcttatcaattttagatgttctttttcgacacaaaaatacccctttagataaaatatctaaaggggtgcaaatttgtaaatttattttaaagctataactatatttattaacctaccaatctcctactcaacagtaacagacttagctaagttacgtggcttatcaacgtcacactcgcggtgaagtgctgcgtagtatgagataagttgtaatggaataactgctactagcggtgctagcgcttcgtgtacagctggtaatacgaagctgtcaccttccatttctaagcctttcattgagatgatacatgggttagccccgcgtgctactacttctttcacgttaccacgaattccaaggtttacgtgctcttgtgtagcaagtgcgataactggtgtaccattttcaattaaagcgattgtaccgtgttttaactctcctccagcgaatccttctgcttggatgtaagagatttcttttagttttaacgcaccttctaatcctacgtagaagtctacgctacggccgatgaagaaacagttacgcgttgttgctaaaaattgttttgctaatgcgtccatttcttctttttgatcacaaagttctatcattgcatttgctacaagtcctagttcgtgtgttaaatcgaaatcaagaacttcaccttttgctttagcaatatcagccgctaaaattgaaagtactgcaagctgtgctgtgtaagctttcgttgatgcaactgcaatttctggtccagcgtataacggaagtgtataatcagcttcacgagaaagcgtagaaccaggcacgtttgtaattgttaatgctttatgccccatttcatttgtttgtacaagtactgcacggctatcagctgtttcaccactttgtgaaatgtaaatgaagaatggtctttctgttaataatggcatgttgtaagagaattcacttgccacgtgtacttcaactggcatttttgcaaacttctcgataaattgttttccaacaagacctgcatgataactcgttccacatgcaatgatgtaaatgcgatcgctatctaaaatcgcattgcggatgtcttgatttaattcaatttcgccattttcatcttgatacttttgaattatattacggattacaagtggttgctcatcgatttctttaagcatgaaatgaggatatgttcccttttcaatatcacttgcgtctaattccgctgtaaacggtgcacgttcaatcgtttcaccttgtaagtttttaattgtaatactttctttcgttacgattacgatttctttatccattaactcaatgaattgatctgtaacttgtaacatcgccatagcgtcgcttgccacaacattaaagttgtcaccaacacctactaatagcgggcttttgtttttagcaacataaatcatgtttggattttcagcatcaagtaatccgattgcataagagccatgtaaaagagatagcgtattacggaacgcttcttctacacttaatcctgtgctcacttgttgttccataagctgtacgataacctctgtatctgtttcacttacgaacgttacatcttgtaaatattcctttttcactaattcatagttttcaattacaccgttatgaactaatgtaaagcgttttgatgtactttgatgcggatgcgcgtttactttacttggaacaccgtgtgtagcccagcgtgtgtgtccgatacctacgcttgctgctacgttctcatctacgatttcacgaagttttgcgatacggcctttttctttgtatacaacaacaccgttctctgcttgtactgcaatacctgctgaatcatatccacgatattctagcttttctaaaccttttaataaaatttcctttgcatcttgctctccaataaatcctacgattccacacatgtttagtcgccgttacaaatgcttacactgctctgcgaacatgtaacgacatagtccgataccatttttatttatactaaaaaacggattacatattgctagccctgtaagcttgtaacggctttcaccttcctctcgattgggtttaagtccgtatatacttatacagctagttttcatccgttcctcttctctcatcacactttcacctttgtccactaagtcaccttaatgatttaagtaaaagcttgcggttgtgatgaacaaccgggagtcatccgccgaaatctcgataaaccccacctcgtcaactacactatttgtagttctggcgcttttatgatttacaatatttcctttgagaaaaagaacaagaccatcttataacaaacatggataaaccgtcaatgaaatttttttcatcgtctataaaacatatgaaaaaggagcactttttgtgctcctttttcatataaattcagctaattattcagcgccaacttcggctttcacaacttctacaatgcgatgtacatatgcatcacaaacttcttgtgttggtgcttctgccattacacgaataagtggctctgttccagatgggcgaacaagaatacggccatcaccgttcatttcttcctctacaacacgaataatttctttaattttttcattttctaatgctaattttttatctgttacacgaacgtttactagcaattgtgggaatttcgtcatttcccctgcaagttcagataatggctttttcgtcattttcatgatgtttacaagttgaagtgcacttaacattccatcaccagttgtaatgtaatcaagtaagataatatggcctgattgttctccacctaggttgtaacctccgcgcttcatttcttccattacgtagcggtcaccaactgctgttttatcacttgtaatattatttgcttcaagtgctttgtagaaacctaagttactcataacagttgaaacaactgtattatgttttaattgaccagtttctttcatgtacttcgcacaaatgaacataatttgatcaccgtcaacgatgtttcctttttcgtctacagcaattaaacggtcgccatcgccatcaaaagcaagtccgatatccgcacctttttcttttaccaattcagctaagccttctggatgtgtagatcctacaccctcattaatattcataccatttggagaagttcccatcgttgaaatatcagcttctaggtctgcaaataagtatggagcaagagaagaagttgcaccatgtgcacaatctaaagcgatatgtaggccagagaaatcttcttcaacagtttgtttaatgtactgtaaatatttttgtccaccttcaaagtaatcactcacttgtccaagattagtacctgtcggacgtggtagttcatcaacttctttgtctaataaagcttcaatctcagcttcttgctcatctgttaatttaaagccgtctgaaccaaagaatttaataccgttatcttgtactggattatgagatgcagaaatcataacacccgcttgtgcgtctagtgcttttgttaaataagcaacgcccggtgtagaaataacgccaaggcgcattacttctgctccagttgataatagccctgctactaaagctccttctaacatatggccagatacacgtgtatcacgaccaataattacttttggacgatctgtatcttttgttaatacataaccaccaaaacgtccaattttgaaagctaattcaggtgttaactccttatttgcaactccgcgtactccatctgtaccaaaatatttacccattatgattcgctcctttttcttgctctttttgattgtgattatctactgttggttcttgactcgtttctttatctttatcttgattttgattttggttttgattcttttcctgttctttttctgaatcaggttcaggattttttggtttctcattttgattttcttgatcggtgtttgaatccggttgttgaccgttaccctgtacttctttatctggtttttctttcttcacaatagtaactttagcacttttttgttttggctctattgaaatattaccaggaccactcacttgaattgaaatatctttcgttcctggagatacattttgcagattaattaccgctgttatttgagcagctgttattttatctactatacttgcttctcctgaaatatcaacacttatctttccatcttgcggcgaaagtagctgagcagtaacatctttagaaagtccatttttctggattgggataccatcaatcgtttttgttttcgtttgttttgttttttgcactcccaccgaaaccttcacttgattcggtttggcacttgttacacccttgggtaataaaacagaggcatcgaatgttgtagactctgtcaattgactaagatctacttcgaccccctctagcgattgtatattatccaaaatatcttttggaccagctatcgttacttctctcggttcaacactgatatttgtaaccgccaatccttctgctaaactccccttcttcgtatacgttacaggaacagttttttcagtattattggctgtattttgcgttgccacattcaacgttacactaatcttagatggacttgttcttacatttaaacgttttccttctttattgtataatgtaacttcgggcgtttttgtaacagttttattaacaccttttaaatcaacatacgctttggcagatgaaatgctttcaatttcttctttcgtcccaactacctcaacagtatccggtttaaggcttgatttttctagagtagcccccgctggcatctgatcctcatttgataatttcagatctacatgaacatattttctcgccttttcatgaagagtaactttaattgttgatggctgaactgttcctttcacatcatctggaagcccgttcgtttttaaagaaatctcataagttccttttggactatctcgcaaatcaactggtatgtcaaattgtttttttgcttttgctgtagcaactgatgcttttgggccttctaattttactttaacgccctctgccggaataccacttacaatatatttctcctcatcatacttaagattaatagcataattagttaatgtttctttcgtatcatttgcaaaaggtaatataactgatgtcgtatttttttcagttaacgtcgctgacataaaaagcatacacgccaatagtaatgagatcccttttaaaaaccaatgattctccattaacttatccatgacgctttctcctccaattccataaagacgaagaagtcgttttttcgtttccactaaattcagctaataacatatccttcagctgttctgtcttcaaatcacgatgcaacttaccatttttcgttaaagaaatttgaccagtttcttcagacacaactactgtaatactatcagtaacttcactaactcccattgcagcacgatgtctagttcctaattctttagaaataaacggactttctgataatggaagatagcatgctgctgctttaattgtacttccttgcataattaccgctccatcatgaagaggtgtatttggaataaaaatattaataagtaattccgatgatacgtttgcattcagcggaatacccgtttccacataatcacccataccggtctcttttgacaaagtaattaatgcaccaattctacgtttccccatatattcggttgcttttgctatcgctgttgcaaccatttcaggttcatcatcctcatgcgttccaacacgcgaaaataaacttccgcgccctagctgctcaagtgctcttcgcaattctggctgaaagataataataacggctaaaaatccccacgttaatacttgttcagttagccaagatagcgtacgcaattcaaggaaaatactgatcatcttaacgacgataataactgtaatcccttttaaaagttgaacagcttttgtccctcggattataagaattagcttatatataataaaccatacaatggcaatatctaatgccgtactaagatatttcaaaatggtcgtatcttcaaaaggcatgctatcccttcctcctacttacgagcaattctatccatatattgaaatattgttttatgctctatctgtatgtatttccaacaactagttaattataccatacatgaaacaaacgacaattacaaacaaccccctttagctcaaattggtaagatgtcaaacatttttattgtacagtataatataaatcattattatacgcctattttcaaataaaaaaagcaacttctcagttgcttttcttacatttattttagtttttcaccgaataaagaacccattaaagcaactgctgttgttgccgttctatttctctcatctaaaatcgtatttacctcaacaaattcagcagatgtgataatatcagcttctgctaacatttccatcgccaaatgactttcacgataagatagaccgccaattacaggcgttccaacacctggtgcatcatgaggatcaagaccgtctaaatctaatgataagtgtacaccatcagtatgagataaatatgcgattgtttcttccataacagccgtcatccccatacgatcaatttcatgcattgagaacactttaataccttcattgcgaatgaaatctttttctccttcatccaatgcacgcgcaccgataattacgacattctcttttttcacctttggatatgctccgtataaatctacaagtgaagaatgtccataacctaaacttgctgcaagtgacataccatgaatatttccagatggtgaagtttcctctgtatttaaatcaccgtgtgcatcataccaaataacgcctaagtttttataatgttttgctacaccagctaatgtaccgatagcaatactatggtcaccacctaatacaagtggaaaacgaccttcttctataatatgatccaccttacttgctaattcattacatacagttgcaacttgtgtaaggtttcttaattttgtattttcatctatctctttttctctctctatacatatatctcccatatctttaacgtcatatccaatttcttcaattctttcaattacccctgcataacggatcgcgctcggtcccatatcaactccacgacgcatctgtcctaaatccattggaactccaataactgagatttcctttttcatagatagtatcccccttttatgccttcactaaatattttaaatcttttatatagtctgactcaactcgacatttttctgtatggatatacaatttattcacttatattcatactgaaaaccaaatttcaagactattctatgtataaagttaacttaatgaaacaatcgcaatcactattattaaataataataataaaacactcctacatttagaagtgtttttctgatgctattttccatactattgcaatattttttgttgtcatttcaatattttcttctgctactttatatgcttcttctagtgtcatcggtctcgttgtaatactaaataccgcatctattcctttctcgtacacagctgaataatcagatgatacagaccctccaatagcaattacaggcacagaaaaacgttttgcacgccccgcaacacccacaggagcctttccatatgcagtttgtttatctattctaccttcaccagttataatgagatttgcatcttctatatgtttatcgaaatttgtataatctaatacaatttcaatgcccctccgcaagtctccctttaacactgaaataacagccgctcccattcctcccgctgcccctgcaccaggtatttcagatacatcaaaagatacatatcgtttaagcatattcgcataatgttgtaaattctcatctagctctttcatcatctctacatttgcacccttttgtctcccaaatatgaaagatgctccctgcattccgactaatggattatccacatcacatgccgcttctatctttaccccctttaagcgggggtccatttgtgaaaaatcaatagcaacaatcgaatgtaatgtgcctccagatggatctattacttcacccttgtcatttataaatcttactcctaaagctgctaacatacctgccccaccatcatttgtagcacttccgccaagtcctaaaattatgtactccactccttgatctagcgcatgtaatataagttctcctgttccttttgtcgttgtaataagtgggttgcgcttttcaactggaacgtgctgtaatcctgatgctgctgccatttctataaacgctgtctttttatctttagaaatgccataaaaagcttgtataccttctctaagcggtcctgtcacactaattgatataattctcccccctgtagcatcaacaagtgattcaaccgtcccttctcctccatctccaattggtattttcacatactctgcattaggaaaaattgctctaaaacctctttcaatagctccacatacttctatagcttttaggctttctttatatgaatcagatgcaataacaactttcacaattatctccccatcccttatttttacgttttcttcattttaaacgacaagtataaaagttgtctttttaaacacaaaaaaagcttacatcatatgatgtaagcttttttatttagatggagcctagcgggatcgaaccgctgacctcctgcgtgcaaggcaggcgctctcccagctgagctaaggccccttattaattaagcggaagacgggattcgaacccgcgaccccaaccttggcaaggttgtattctaccactgaactacttccgcaaaaatggctgggctagctggattcgaaccagcgcatgacggagtcaaagtccgttgccttaccgcttggctatagcccattaatatttactagtatggttatcttttcaaaaaaataaaccctctcaggttattttaaagaaaatggtggaggggggcagattcgaactgccgaacccgaaggagcggatttacagttagtttgtctagcatctaaaataaaaattgacgtttcacgttgtttgtttcgtttagttttcaaagttcaatatcgcgtttcagcgacttttataatatatcatagtatattattttcgtcaacaagttttttcgataagttgtatctctcatttgctgactctgcctattatataggctttctcttccctatgcaagtattattataaaaaaataaagagagggaaaatcccctctcttattcttctgaagaaacctcttcactcgtttcttcctcttcatctttttgtgcttttgctaccgtcgctacctcttggtcttcctctaatcgaattagacgaacaccttgtgtattacgtcccatttgagagatttgatcaactggcatacgaataataacgcctgccgctgtaattaacataatatcttcttcacctgtaacagatttaacagctactaatttaccgttcttatctgtaatgttacaagttttcagacctttaccaccgcggctttgcagacggtattcatcaatcggtgtacgctttccgtaaccatttttcgttacaattagaacatttacatcctcttcgacaatttccatacctacaacttggtcttcatcgcccaacgtaatagctttaacacctgcagcattacgtcccatagaacgaacatcttgttcattgaaacgaattagcataccgttacttgtcccgacaataatatccttatcacccgatgttaaacgtacagatattacctcatcctcttcacgaagagaaattgcaattaaaccatttgtacgtatatttgcaaatgatgaaagtggcgttctcttagaaaccccttgttttgtcgtaaagaataagaactgatcgtcaccaaattcacgaatcggaataatagcgttaatccactcacccttatctacccctaataggttaataattggtagtccttttgcagtacgactatactctggaatttcatatcctttcgtacggtatactttacccttgtttgtaaagaataaaatatgatcatgagtagacgttgttaataaatgttcaacaaagtcatcatcattcgtacccattccttgcacaccacgtcccccacggttctgtgttttgtacgtagaagctggtaacctcttaatataaccgttatgagttaacgtaatcgcaatgttttgttcaggaattaaatcttcatcttcaataaattccataccgccaattgtaatttctgttcgtctcttatcattgaaacgctcttttacttctgttaattcttcacgaataatctcaagaactttttcttcatctgctaaaatcgcttttaattcagcaattaacttcattaagtcttgatattcttgctcaattttttcacgttctaatccagttaagcgttgcagacgcatatctaaaatcgcttgcgcttgtttctcacttaaaccaaaacgttccattaagccttgcttggcaatatctgccgtttttgaactacgaattaacgtaataacttcatcaagatgatctaaagcaattcgtaatccttctaaaatatgagcacgtgcttctgctttttctaattcataagcagtacgtctacgaattactaccttctgatgctctaaataatgatatagattttgttttaaatttagtacttgtggctccccatttacaagagacaacatattaataccgaaacttgtttgaagcgctgtatgtttatatagattgtttaatagtacgtttgcattagcatcacgacgtacttccatgacaatacgcataccattacgatctgattcatcacgtaaatctgtaataccttcaattttcttatcgcgaactaattctgcgattttttcaattaatcgtgccttattaacttgataaggtagttcagttacgataatagattgtttaccgtttgacttctcttcaatttcaaccttagcacgaagcataatggaaccgcgacctgtttcataagctcttcgaattccacttcttcctaaaattaaacctgccgtcggaaagtctggaccgggaatatattccattaattccgcgatagtaatatcaggattatgacttaatgccagcacaccatcaattacttcgccaagctgatgcggcggtatatttgttgccataccaacagcaatacctgttgtaccgtttactaataaattagggaaacgcgctggtagtactatcggttctctttcggaaccatcatagttatcttgataatcaattgtattttttgaaatatcacgtattaattccatagaaatcttagacattcttgcctctgtataacgcattgcagctgctgaatctccatctacagaaccgaagttaccatgcccatctacaagcatataacgttgactaaaatcttgcgccatacgtaccattgtttcataaacggctgaatcaccatgagggtgatacttaccgattacttcaccgacaatacgtgctgatttcttatacgctttatcagctgtaattcctaaatcattcatcgcatataaaaccctacgatgcacaggttttaatccatcacgaacatctggtaatgcacgagatacgataacactcattgcgtaatctaaaaatgaggtacgcatttcatgactaatattaatttctcgaattcgtgcttgttgttgattgtctgacatcaacgagcacctcctcttacatttccgttacacatacattgatttatatgtagaagacaggaatacttagattcctgtcattactcatttaaatatcaaggttcttcacgtattttgcattctcttggataaagttacgacgtggctctactttatctcccattaaaatttcaaatgtttcgtctgcttcaattgcatcttgaagggaaacttgaagtaatgaacgtacttctggatccattgtcgtctcccatagctgagttggattcatttcccctagacctttataacgctgaatccctggcttaggttgggccggtaattctgctaagattttttcaagttccttatcgttgtaagcatattgaatttttttaccttgttgtattttaaacaacggcggctgtgcaatatagatataaccacactcaattatttgacgcatataacgatagaagaacgttaataatagggtacgaatatgtgcaccatcaacatcggcatcggtcataataataaccttatgatagcgtgctttttcaatatcgaagtctccaccaatatttgtaccaatcgccgtaataattgtacgaacttcatcatttgataaaatcttatctaagcgtgccttttccacattaataattttacccttcagcggtaaaattgcttggaaatgacgatcgcgtccttgttttgcagatccacccgcagagtcaccctctacgatgtaaatttcactaattgctggatctttcgaagagcaatcagctaatttaccaggtaaacttgaaacttctaacgcactctttcgacgtgtcaattcacgcgcttttttcgcagctacacgtgcacgtgcagccatcgtacctttttctacaatttttcgcgctacattaggattttctagtaagaacttttcaaacgcctctgagaatacagactctgtaattgttctcgcttcactattcccaagttttgtcttcgtttgtccttcaaattgtggatttggatgcttgattgatacaattgctgttaaaccttcacgaacatcctcaccagttaaattactgtccgcatcttttaaaatgctatttttacgaccatagtcgttgattacacgagttaaagctgttttaaaacctacctcatgtgtaccaccttcatacgtatggatgttattcgtaaatgagtaaatattatttgtgtatccctcgttatattgaagagaaacctcaacctgaataccatcttttgaaccttctacgtacacaggctcttcatgaatcggttgttttgagcgatttaaatgctcaacgtatgatttaattccaccttcgtaatggaattctttcttttgcttatgttcacgtttatcttcaattgttaatttaatattacgatttaaaaacgctaattcacgcatacgagttgctagcgtatcaaaatcgtatactgttgtttcttggaaaatttccggatctggtttaaatcgagttattgttcctgtttgatctgtgtcaccaatgacttttaaatccgcaaccggaatacctctttcgtatttttggtaatggattttaccttcacgatgtacaaatacttctaattctgttgatagagcatttacaaccgatgccccaacaccatgtaaaccaccagaaactttataaccgccaccgccaaatttaccaccggcatggagaacagtcataataacttctacagctggacgtcccattttttcttgtataccaaccggaataccacgcccattatccgttacacgaatactattatcttcttcgatactaacattaatttcatcacaataacctgcaagtgcttcatcaatactattatctacgatttcccacacaagatggtgaagcccttttccacttgtagatccaatatacataccagggcgtttccgaactgcctctagtccttcaagcacctgtatctgactttcatcatatgcattttcttgcatttgcttttgttccattgacacaaagatcacctacttttccatttaaacaggggttattccctatctatttcacaatctacagtgccgttcgttacatgaattgttttcgcttcttttaatgtttcgtgttcaattccgtcgacactcgtcgttgtaacaaatgtttgcacttttccttgaattgtatttaaaagatgtgattgacgataatcatctaattctgataaaacatcatccaacaaaaggattggatattctttaacctctgaataaatcaattcaatttcagctaattttagggatagtgcggtcgttcgttgttgtccttgcgaaccaaagacttgaacatttttactattaacgaagaattgtaaatcgtcacgatgaggaccaattaaagtcgtaccacggaaaatttcacgttgtttcacagattgaaaactttcatagtatacttcttttattttcgacaaatccattgattctgatacatctacacttggtttatagacaatttctaactcttctaatccacggcttatacctcgatgaattggagctgcccattcctgtagcaaatgcaaaaattcaaaacgtttttgcagtattttcgcaccatgctcaattagttgaagtgtaaatacatccaacatcgtttcctcattcttactattcccttgcatttttttcaacaagtgatttcgttgcgtgagcaccttttgatattgacttaattcatacaaatatacaggagctatttgtcctaattccatatctaaaaagcgtcttcttacttgagggcttccttttacaagatttaaatcttctggggcaaacatgacaacgttcatcacgccaatatattgacttaacttttgttgttcaagttgatttaattttgcctttttaccttttttcgaaatatttaattccaaagacaaagaactgtttcttttttgtaatttcccctttatttgaccaaaatcttcatcccagcggataagttcgcgatcattagaggttctatgagatttcgccatcgctaaaacataaatagcttccatcaaatttgttttcccttgtgcattttcgccgataattacatttaccttatcttcaaaggaaagctctaatttttcataattgcgatagttttttaattgtatttctgaaataaacaaagggctccccctttatgcctgaacttggaaagttccgcttcctggaatttcaataacatcattcgcatatagtttgcgacctcttctattttcaagttcgttgttcacgtacacttcatattcttgtaaaaaccattttacagcgccacctgtatcaattacatcagctaactttaaaaattgtcctagtgtaatatactctgttgaaattttaatacgtttcataaaatcgctcactttctgaaagtgttcattctttcattgtactaaataaactagcattaggaaagtaatacccaaaaatcaaataagggccactagcatctttaaactagcaacccttattccttacctagtaagtacgaaccggtaaaattaattgaataattgaatcatcatttactgtacgaattaagaacggtctcattgccccagtaaagctaactttaatctctgtactatccaaagcttttaatgcatccatcatatattttgcactaaaagatatttttaactcttctccatctactttttcgcattgtacttcttcgacaacttttccgatttctggtgaattcgaagaaatctctagcatttcttgctctaaagttgataatttaacaacgttattgcggccatctcttgctaatagtgaagcacgatcaattgcttgtaggaattcttttgtatttacaaaaatatccgttttactctctgctggaattaaacgtgtcgtatcaggataatttccttctaacaatcttgagaagaataataaatgttttgtacggaataatacttgatactccgtaataacgatatctaccatttcttcagactcatctaaaattttacttaattcatttaagctcttacctggaataacaacattagcttggaattcatctgcaatgttatgtccttcaatttttgcttttcgaagtgccagtctatgactatctgttgcaatacaagttaactcgctgttatataccttccagtttacacctgtcaagatcggtcttgtttcagaagtagaaactgcaaatacagtttgtctgatcatatgcttaagtaaatctgttggtatcttaaatacatgatgttcttcaatctgtggcaataacggatattctgcagaatctaaaccatttaagttaaactctgattttccagattttatttttgtcataaaatgattttctacagaaatttcgacagtgtctttaggtagtttttttacaatctcactaaaatattttgcctgtaaaacaatgcttcctgattgagcaatttctacgatttcttttccatcttcttcgactggaataaacgattcaatagaaatatcagcatcgcttcctgttaatgtaaccccttcttcagtagctacaactttaattcccgtaaggatggggattgttgtacgagaagaaactgccttcattacatcttgtacacctcttacaagatagtctttttgtattgtaaaacgcataaagaaaaacctccggtaagtataagattttatttaattaataaagataaaaaaatagtagtaatagtaatagggcttgtggatatgtggataacccctataaaggatgtaaaaacagtctatctacatgtggatagactgtgcgtaaaacaaggtaagttattcacactattcagctactactttaaaataccattaatttcttcaacttgcttttgtaattgcgtatcggtttttagtagtttagagattttttcatgggcatggataactgttgtatgatcacgtccaccaaattcttcacctatttttggtaaagaggaatctgtaagctcgcgcgataaatacattgcaatttggcgaggaaacgcaactgatttggtacgttttttcgctttaaaatcttctaatttcacttgataaacatccccgacagctttttggatatcataaatagagataatttttggcttagaatttggaataatatctttaagtgcttcagctgctaaatcagcattaatatctttattaattaaagatgaataagctacaactcggataagtgcaccttctaattcacgaatatttgaatcaatttgatttgcgatataaagcataacttcatttggtatatcaagcccttcagcttttgcttttttgcgtaaaatcgcaattcgtgtctctaaatctggcggcgtaatatctgtaataagcccccattcaaagcgggaacgaagacgatcttctaaagtcggaatttcttttggtggtcgatcactagaaattacaatttgtttactttcttcgtgtaatgcattaaatgtatggaaaaactcttcttgagtttgttcttttccagcaagaaattgaatatcatctatcaataaaacatctacgttgcgatatttattacgaaaatcaacagccttattatcacgaatagagttaataaattcatttgtaaatttttctgatgataaatatacaacttttgcatttggattatgttcaattacataatgaccaattgcgtgcattaaatgcgtctttccaagcccaactcccccgtaaataaagagtgggttatacgctttagctggcgcctcggctacagctaatgaagctgcatgggcaaaacggttaccagagccgataacaaatgtatcaaatgtatattttggatttaacatgctctgtggtaaatgagctgaatcatcttgtgctggattcggcttaactggaggcagatcaatatcctcttcagcttgactttgaggaataataaagcgaattgctaattttgcccctgttaaatcgtatagtgtttctgaaattagttcggagtaatgagattctagccagtcacgagcaaattcatttggagctgtaatcgttaatacgtctttcttcaagttatgagccgttgttgattttaaccatgtctcataactaggcttgcttacctttttttctaattcttttaaggcactattccataaatcagagatattttccaaaggtgtccctcctttactaagatggtaaaagaataaggttgcgcaacaaatgtacaacccaataaatataaaatgtatatttatacgaaacgtattttaaaacctaaaaacgtcgtttgtatatgagatagggttttcgacaaaaaaagcaaatgtggacaactatttacccacatgtgattaaaactgtccacatgttatacacaaactgtggataaaataaaggtgtggaaaacttattcaaagtgaaaacacaactataatatcaaaaaaaagtggctatagcaatgaatttaagaaagttatccacaaaatcaataccttgtggaataaacttgtccacaacacgatatactgtgtaaaagtgcgaaaaaagtttgtggatataaaaaacgtgaaaaaacatttatccacaaggaaatataggtgctgtgtaaaagtatgtgaataggttcaaaatgaatatttgatgaaaatttctagaaccattgacattttcctagttgattaactataatttataggactgtctttaacagatattcctcagggaggtgtcatataatgaaaagaacttaccaaccaaataaacgtaagcgcagcaaagtacatggtttccgcagccgtatgagcacagcgaacggacgtaaagtgctagcagctcgtcgtcgtaaaggaagaaaagtattatctgcgtagaccactgatcgttcagtggtctttttttctaataatagtgaatttccgctgatgaaatacaggagtgtcaattgatatgaagaaaaaacatcgtataaagaagaatgatgaattccaggcggtttttcaaaaaggaaaatcaaatgcgaatcgtcagtttgttgtataccaattagataaagaagaacagccaaactttcgcatcggcctttctgttagcaagaaaattggaaatgcagtagttcgtaatcgaattaagcgcatggtccgtcaggctattacagagttaaaagatgagatagattctgggaaagattttgttataatagcaaggaagccttgtgcagagatgacatatgaagaagtaaagaaaagcttaattcatgtctttaaacgctctggtatgaaaagaataaaaaagtagcgtaaggaaatgaattacactatatacataccgatacaaggaggagtaggctttgaaaaagaaattaggtttactagccatggtcgttgcattaatggcgattgccaccggttgtagtgaaacgggtcagccgattacatcgaaaagtactgggatttggaatgaatatttcgtatatccgctttctcagttaatcacgtattttgccgacttatttaacagtaattacggtttagcaattgttattacaactcttatcattcgttttgcattattaccactaatgattaaacaaacgaagagtacgaaagcgatgcaagcgttacaaccggaaatggtgaagttaaaagagaaatatagctctaaagatcaagcgacacagcaaaaactgcagcaagaaatgatgcagttatatcaaaaaaatggtgtaaatccattagctggttgtttaccaatctttattcaaatgccaattctgttcgctttttatcatgcaattatgagaacagctgaaattaaacaacatagtttcttatggttcgatttaggacatgcagacccgttctatatcttaccggtcgttgcagcaattacgacatttattcagcaaaagcttgcaatggcaggaacagctggtcaaaatccgcaaatggcaatgatgctttggcttatgccgattatgattttaatctttgcaattaacttcccagccgcattatcactttactgggttgttggtaatatctttggtattgctcaaatgtactttatcaaagggccagaaattaaggctagcaaagctggaggctcaagcaagtgagtataattactgctaaaggacaaacagtcgagctggcagtagaggatgctttaaggcaattaaatacatcaaaagatcgagtagatataaatattgtcgatgagggtaaaagaggattcttaggtttatttgggaatcgtcctgcagtagtagaagttgtattgaagaaagatccaattcaagaatgtgaagaatatttaagaaatgttattcacgatatgggtgtggaagttgagattagtaaaattgtaaaaggacgcgaaattgaatttacaatttctggtgataatgtaggtgttttaattgggaaaagaggtaatacattgaactctttacagtatttaacaaaacttgtcgcgaatcgtaacacgaagcagtatatcggtattacactagatgctgaaaattatcgtagtaaaagaaaaagtacgttagaatcactttcttatcgattagcgaaacaagtatttaatacgaaaaaaagagttattttagaaccgatgccatcttttgaacgaaaaattattcatcaggcattatcaaatcatcaaggtatcaatacaacttctgaaggaaatgaaccacatcggcatgttgtaatatctcctaaatgaccggttgctcaaatgagtgccggtttttttgagcggaaaatagatgtggataactaaaaaacactaaacttatccactgtgaataagtttagtgttttttacatggggatataataaaatgagttattcttcttttgtagataggttcgttatggtatcctaataatttagtgaaagaaataatcatgttgaaatagagataaataagcaagtgaggtgaaaggacatggaatttgatacaattgctgcgatttccacagcgcttggagagggtgcaattgccattgttcgagtaagtggggatgatgcggttgagaaagttaatcgtatttttaaggggaaggatttaacagaggttccttctcacactattcattatggtcatattgttgatttagatacaaatcaagttattgaagaagttatggtgtctattatgcgcgcaccaaggacttttacacgtgaaaatatagtggaaattaactgtcacggtggacttgtttcagtaaataaagtattgcaacttattctagcacaaggagtacgattggcagaaccgggcgaatttacaaaacgtgcttttttaaatggacgtatcgatttatcacaagcagaagctgttatggatttgattcgagcaaaaacagatcgtgcgatgaatgtagcaattaatcaaatggaagggcgattatctaaattaattggtcttttgcgtcaagaaatattagaaacattagctcatgttgaggtaaatatagattatccagaatacgatgatgtagaagagatgacacataatattttaattgagaaagcgacgcatgttcgttcggaaatcgaaaaaatattagaaacatcaaaacaagggaaaattttacgtgagggtattgctacagcaattatcggtagacccaacgttgggaaatcatcgttattaaatagtcttgttcaggagaaaaaggcaattgtaactgatattgcaggaacaactcgtgatgttattgaagagtacgttaacgtgcgtggtgtacctcttaaacttatagatacagccggtattcgggagacagaagatgttgttgaacgaattggtgtggaacgttcaaaagaaatgatgagccaagcggatttagtattagttgttgtcaactatagcgaggctttaacaaatgaggatgaagatctattccgtgcggtacaaggaaaagactttattgttattgtgaataagactgatttaccgcaagcgattgatatggaacgtgttacagagttagccgcgggaaatcgtgttattacaacatccttaattgaggaacaaggaatagatgaactcgaaaaggcaatagctgatttattctttgaaggaacaatcgattctgcagatatgacatatgtttctaatgcgagacatattggattattaacacaagcaggaaaaacaatcggtgatgcagttgaggcgattgaaaatggtgtaccaattgatatggtacaaattgatttaacaagaacgtgggaaatacttggtgaaattactggggacacagtgcatgaaagcttaattgaccagttgttctctcaattttgtttaggaaaataatatagtgaagttgtagaaagatagagattattaggaggaataaacaatgggatacaatgccggttcatacgatgtcatagtaatcggtgcaggtcatgcaggatgtgaagctggtcttgcggcagcacgaatgggctcaaaaacattaatgttaacaattaacttggatatggtagcattcatgccatgtaacccttctgttggtggaccagcaaaagggattgttgttcgtgaaattgatgcattaggcggagaaatgggacgtaatattgataaaactcatattcaaatgcgtatgctaaatacaggtaagggaccagccgtacgtgcacttcgagcgcaagctgataaattctcttaccaacatgaattaaagaaaacaattgaagaaacaccaaacttaacgttgttccaaggaatggtagagcgtttaatcgttgaagaaggtgtatgtaaaggggtagttacacaagctggtgcagaatatacagcaaaaacagttgtaattacaactggaacatttttacgcggcgagattatcatgggcgacttaaaatattcaagtggtccaaataatcagcaaccgtctattacattatctgagcatttagaggagcttggatttgatcttgtgaggtttaaaacagggacacctcctcgtgtaaacagtaatacaattgactacagtaaaacagaaattcaaccaggtgatgataagccacgtgcattctcttttgaaacaacgaaatttattatggatcaaattccatgttggttgacatatacaagtacagaaacacaccgtttaatagatgaaaatttacatcgttcagctatgtattctggtatgattaaaggaacaggtcctagatactgtccttctattgaagacaaagtagtaagatttaatgataaaccacgtcatcaaattttcttagagccagaagggcgtaatacacaagaagtatatgtacaaggtttatccacaagcttaccagaagatgtacaacgtgacatgcttagaacaattccaggcctagaaaatgttgaaatgatgcgtacaggttatgcaattgaatatgatgcaattgtgccaacacaactatggccaacacttgaaacgaaaaagattaaaaatttatatacagcaggacaaattaatggaacttctggttacgaagaggcggccggacaagggcttatggctggaattaatgcagcatgccgttctttaggtaaagaagaagttgttttaggtcgcgaggatgcttatattggcgtcttaattgatgatcttgtaacgaaaggtacaaatgaaccatatcgtttattaacgtctcgtgcagaataccgtctattattacgccacgataatgctgatcttcgtttaactgaagttggtcgtaaaattggattaattaaagaagagcgctatgagcgatttacaaataaaaaattacaaattgaacaggaaaaggaacgtttaagcagcattattattaaaccacgtcctgaagttcaagaattaattcgcaatattggcggaagtgaattgaaagatggaatacgtgcaagtgacttattacgtcgtccagagatgacatatgagcatattcatcttttagtaccaagtgaagtagaattaagtgatgaagttaaagaacaagttgaaattcagattaagtatgaaggatatattgaaaaatctttacagcaagtagagcgtatgaagaaaatggagaataaaaaaatccctgtagatattgattatgatgcgatttctagcattgcttcagaagctagacagaaattgaaagatgttcgtccactttcaatggggcaggcttcacgtatttctggcgtaaatccagcggatatttccattttacttgtgtatatagaacaaggaaaaattgcacgcgtatcgaaccaataaatagtaaggagatattgctagatgaacatagaacaatttcaatctatgctagaagagaagggaatcaccctctcttctagacagttagagcagttcaaaatctactttgaaacattagtagagtggaatgaaaaaatgaacttaacggctattacagaaaaagaagaagtatatttaaaacacttttttgattccattacagctgctttttattatgatttttcaaaaccattctcaatttgcgatgttggtgcaggggctggattcccaagtattcctttaaaaatttgtttcccgcatttaaaagtaacaattgtagattcgttgcaaaaacgtattaatttcttaaatcacttagcacaaaagttagaattaagtgatgttgcattttgtcacgatcgtgctgaaacgtttgggaaaaaagaaggtgtacgtgaatcatacgatattgtaatggcacgtgcagttgcgcgtctttctgtattaagtgagctatgtttaccgcttgtaaaagttggaggaacattcattgcaatgaaaggtgcagcagcaaacgaagaaattgaaaatggcaagtatgctttagaggtgctaggcggagagttaaaagagatgtctacgttccaattaccgtttgaagagagtgaacgtaatattttattaatcgagaaaaagcgcaagacaccaaagaaatatccacgcaaaccgggaacacccaataaattacctattgaaaaataaatcttattagacgtaagattaaattatataaatgaaaacgtaaatgtttcataggaaacattttatggagaatagtcaataggcctaaaaggtggtggaatatgtatgaaaaatacgttttctcgtttatttggctttggagataaagagagcgaattcgaattacaagacgaaagccatgaagagatagataaaaaggtatatgaagaaatacaagaaattccgatagtaaatattacccctaaccgttatcaaccaagaacagtttttgatgatgcgcgtattgatgagctagcattaacaattcgtacacatggacttattcagccgattgttgtaaggcaatatgaggatgataagtacgagattattgctggagaaagacgttttcgcgcggcaacaaagttaggttgggaaaaggttcctgcaattataaagaacttaaatgatacagagacagcttctgtagctttaattgaaaacttgcaacgtgaggaactaacggcaatcgaggaagctgtggcatatcaaaagctgattgagttacataatttaacacaagaagcattggcacaacgacttggaaaaggacaatctacaatcgcaaataagttgcgattgttaaagttgcctgaagaaataaaaagtgcattattagaaaaaagcattacagaacgtcatgcccgcgctctcattcctttaaaaaatgaggaattacaactgaaagttttacaggaaattgtggagaaacaactaaatgtaaagcaaacagaagaacgaattgcgaagttactagaggaagcgaaaccgaagcgtaaggcaaagcaaaaagcagtaagtcgagatacgaggattgctatgaatacaattagacaatctttacaaatggttactgaaagtggtttgaatgttaattctgaggaagaagaatttgatgagtactatcaaattacaattaaaattccaaagaaaaaataataatgacgtgctagagaccttatcctattggagaggtctcttttactatattttcttgttaaatgaagaaggagtttagaaataaattttgaagtttaataaaggacgtaaaagaaaaagttttatttcatgttacaataaacgtaattgttactagaataagatagaaaggttgaaagtaggtgacatcatgggaaaaatcattgctattgctaatcaaaaaggcggtgttggaaaaacgacaacatctgttaatttaggggctggattggcgcaagtaggtaaaaaagtccttcttgtagatattgatgctcaaggaaatgcaacgactggtgtgggaattgaaaaatctgaattagatcaatgtatttacaacgttcttgtggaagatgcagatgttcaaggggttatacagaaaaccgcaactgaaaacttagatgttctacccgctacaattcaattggctggtgctgaaattgaattggtaccgactatttcccgggaagtacgtttgcaaagagcattacagccagttcgtgatgaatatgactatattattatcgactgtcccccatctttagggttattaacgattaatgcattaacagcagcagattctgttattattcctgtacagtgtgaatactacgcactagaagggttaagtcagctattaaatacagttcgacttgtacaaaaacatttaaataaaaatttagcaattcaaggtgtattgttaacaatgttggatgcccgtacaaatttagggatccaagttatagatgaagtgaaaaagtattttagggataaagtatatcgctcgattattccgcgtaatgtacgcttgagcgaggctccaagtcatgggaaacctattatgcagtatgacgctaaatcaagaggagcagaagtatatatagatttagcagaggaagtgattgcaggtggctaaaggattaggaagaggaattaatgtgttttttcctgatttagatgtgaaagaagaggaaacaattcaggagattcttgtaactgaattaaggccgaatccatatcaaccgcgtaaacactttaataaagaggcgattcaggaattagcaatttcgattaaggaacacggtattctacaaccattaattgctaggaagagcattaaaggatatgaaattgttgcaggtgaaagacgatttcgtgctgcaaaagaggctggtttagaaaaagtacctgcggttgtaagacaattaaatgaacagcaaatgatggaatttgctttgttagaaaacttacaacgagaagatttaaatcctatggaagaggcaatggcataccagatgttaatgaatgagctaaatgtaacgcaagaacaattagcgaaacgtcttggtaaaagcagaccttacattgcaaattatactaggttattaagcctaccttctttcgtacaagatatgattgcaaatggtcaactttcaatggctcatgggagaactttacttacgataaaagatgaagaacaattgaagtccttattgaaacgcattgaaaaagaaggattaaatgttcgtcaattagagaaaatcgtccaagagattaatcaacacgtttcacgtgaaacaaaaaaagtgaaaaaagagcgaaatatatttttcgtagaacgtgaaacgttcttaagagaaaagtttggcacagatgtgaaaattaaagagacgaaaaaagaaaaaggtaaaatcgaaattgaattttttaataaagaagatttaaatcgtattttagaactattagcacagaaaaattaaaaagcaaaccatcttattatttatagatggtttgctttttttaatgcggataatttttgatccgtctcttttatactttgtgcgattacatcagccattttcatgactaaacttaatcttgtattttgaagaacgaaaaactccataaacccatttagattgacgataccgtgtatgtgcaaatcaccaactgcaggtaatttcttattcatagcagctccaggtttactaggtccctttccagtagtgattgatccgatattttgggactttcctaaacatgcatcaacagcaattataaatgcagtaggatattctttctgtatattctgaattttctcttctaaatttagcgcatgtactggctcatctagtgtaccgaatacttggaggttttggatgtctatttgttcaagttttgtaccaactaatgggccgagtgcgtcacccgtagagcgatctgtgccgatacaaacgagaatgagtggtatattagttttaataggaatatgggtaagtaagaaattactgattatctcggaggcttctagatcttggtgcataacgttttgagtttctttctcaaaaaatggtaagcgaaaacttccaatattcatgaagcacccatccttttaataaattttcaatatgtgttatatggtgaggaaaatggaaagttataagtgcgtaatttttgcaaaatgtgaatgaaaacggaaataatagtactagtatatatatattcgttccattttatacctggatatcggggataaaataggattaaaatcataaaattttttcagcaattaggggacttctgatacaataataagggtaactaaaaagaaattttagctagagaggtagaggtacatggatttattaacgaagtggtttaattctatgaaacagtatttattagatgctgatcgttgggctcatattggagttgcgacattaaaaatatgcattattttaataattggtgcggttgttgtgcgaattgcaagagcggttgtacgaaatgcgtttcgcatgggaagtcgttctccaattcaaatttcagaacgtcgtacagttacagtagcgaaattacttgaaaatattgtagcgtacgttgttatgttcattatgctaattgcgattttaggtgtgtttgatattaatgcatcaggtttattagcgggtgctggggtaattggtttagcagtcggatttggtgctcaaagtttagtgaaagacgttattacaggtttatttattttgttagaagatcagttttcagttggcgattatgttaaaatcggtcaatttgaaggagtcgttttagaaattggacttcgtacaacgaaagtaaagagttggacaggtgaaattcatactttaccaaatggaagtattattcaagttactaactactcagttagtaatagtgtagcgtttgttgatgtatctatttcatatgaggctgatattgcgaaagcagagcaggttattgaagatttattagtagaattaccttcaaagtacgaaaaaatggtaacaacgcctcaattattaggtgtgcaaacattagctgcatcagaagttatattacgtgttattgctgaagtagaaccgatgcaacatgcagttattgcaagggcacttcgtaaagagattaaaaatcgtcttgatttacatgggattgaaattccatatccgcgtatggttttatataatcgtgaagaattagttagtggaaaagcaatttagtatggagaggagtttggagagtggagcaaaaggaatataacttgtatgatgttgtggaaatgaagaaagcccatccatgtggcgagaatcgttggaaaattattcgtatgggaatggatatccgcattaagtgcgaggggtgtgaccattcagtaatgattcctcgaagagagtttgatcgtaaggtaaaaaaaatacttgtgaagcacgaagaatagagggagagtaacagttacagtaggtaactgttactttttttcgtttggcggaaacttgtcatttttttcgttactatctataatgatgaaagattgagacataggagtgaaaaatatgggattaacggctgggattgttggattacctaacgtagggaagtccactttatttaatgcaattacacaagcaggagcagaatctgcgaactatccattctgtacaattgatccaaacgtagggattgtagaagtaccagatgagcgtttaaataaattaacggaactagtagaaccgaaaaagactgttccgactgtattcgagtttactgatattgcaggtatcgtaaaaggtgctagtaaaggtgaaggtttaggaaataaattcttatctcacattcgtcaagtagatgcaatttgtcaagttgttcgttgttttgaagacgaaaatattacgcacgtttcagggaaagtagatccaattgatgatattgaaacaatcaatttagagctaattttagcggacttagagtctgttgataagcgtatcgagcgtgttgcgaaattagcaagacaaaaagataaagaagcggtatatgagcatgaaattttagttcgtttaaaagaagcttttgaagagggaaaaccagctcgtactgttgaatttacagaagagcagatgaagattgttaaaggccttcatttacttacaacaaaagaaatgttatacgtagcgaatgtaagtgaagacgatgttatcgatccttcggaaaataaatacgtacaaatggtaaaagaatttgcagcaaatgaaaattctcaagttatcgttgtatgtgcaaaaatcgaatcagaaatcgctgaattagacgaagaagagaaaaaagtattccttgaagaattaggaattgaagagtctggtttagatcaattaattcgtgcagcatatgatctattaggacttgctacttactttacagctggcgttcaagaagtacgtgcttggacatttaaacaaggaatgaaggcaccgcaatgtgctggtgttattcatacagactttgagcgtggatttattcgtgcagaaacagtttcttacgatgacttaatgacaaacggttctatgacagctgcaaaagaagctggaaaagtacgtttagaaggaaaagaatatatcgtaaaagacggagatgttatgcacttccgttttaacgtttaatttaatatttcctaggaaaaataaagatatgagcttggcaaatatattatatgtttgccaagttttttatgtattggtgagttgattcatataacttactatgatataatctaaactcgtgagtaattactataaattaattgctccttgcccattacgggccgtttagaccaaaaggaggtgaaagtgtaatgagaaagtacgaaattatgtacatcattcgtcctggcgttgaagaagaagctcaaaaagctttagttgaacgttttgcaggtgttttaacaaacaatggtgcagaaatcattaacacgaaagagtggggtaagcgtcgtttagcttacgaaatcaacgacttacgtgaaggtttctacatgatcttaaacgtgaaatctaacgcagaagcgattaacgaattcgaccgtttagctaagatcaacgaagacatccttcgtcatatcgttgttaaagaagaagaaaaataattgatatataagggagagtggttcgattgatgaatcgtgttatcctcgttggtcgtttaactaaggaccctgacttacgttacacgcccaatggtgttgcagtagctacttttacgttagctgtgaatcgcgcatttgccaatcaacaaggtgagcgtgaagctgactttattaattgtgtaatatggcgtaaacaagcagaaaacgtagcaaattatttgaaaaaaggtagcttagcaggcgtagatggacgtcttcaaactcgtaattacgagggacaagatggtaaacgtgtatacgtaacagaagttcttgcggaaagcgtgcaatttttagagccgcgtaatggcggtggggagcaacgtggttcatttaatcagcaaccatcaggagctggtttcggtaaccaaggctctaacccatttggtcaatctagtaattcaggtaaccaaggtaactctggatttacgaagaatgacgatccattttcaaatgtaggtcaaccgatcgacatttccgacgacgatttaccgttctaatacagtaaatttgttagttttaacaaagaatggagggaaatagacatggcaggacgcaaaggtggacgtgcgaaacgtcgtaaggtgtgtttcttcacagctaacggcatcactcgcattgactataaagatgttgatttattaaaacgtttcgtttctgagcgtggtaaaattttacctcgtcgtgtaacaggaacaagcgcgaaataccaacgcaaacttacagttgcaattaaacgtgctcgtcaaatggcacttttaccatatgttggtgaataatagcgtatgaaatgcacagtagagtcggactctactgtgcattttgctatgcttttcttttttgaaagagaggttaaaatgtgaaacaagcaagatttattactgaaggtgccgcgttgttggctatatatgcaatgttattgcttatatctatgtatgttccgattttgggtacagttgtaacttttgcgttgccgttaccatttatactattaatgataagacataaactatctaatgtgctcgtggtttttgtagcggcactttttgttactgttattgtgagtcaaccgatgaatttagtgaagacaattatgtttggattgatagggattgttttaggatatatgtataaaacaagaaaaaagccagtggaaatcttaatagctgggacgcttgcatacttaattggttttgtacttatttatgttgcgagtataaagtttttcaacatagatataatgaagcaaatgcaaagtatatttagtgaaagtatggcgaaaagcgaaaagatagtaagtgctacaggtatgccgattagtaaggaacaaaaagagttacttgcacaaatgaatgatatattacaatcattacttccgagtatacttgtgctagtttcagtatgtttttcttggattacagtgataatatcaggtagtgttttgaaaaagttaaaacatgacgttatatcttggcctaaatttaaagatatacaattaccaaagagtatcatttggtattacgttatatttattttgttagcaacttttataaaagtagaaccaacatcatatttacatatggtattttctaacctaaatgtcatatttgcactattgcttgtactgcaaggtctgacatttatcgcctttttagcgtatagaaaaggttttactaaaggggttcctattattagttttattgcatgcatgtttattccgatgctgtttcctcttgtgacaatcttaggtataattgacttagggatttcattgcgttctaaaatagggggataaaataatattccttatactattttaatctgtttaactaactggaaggtgagttagttttactttataggagttgtatacatgcctgaatttgataagaaacagtggtttttatatcctgtttatgtattggcattttttgtgtttgtgctcatttcaattctctgttattttcatttaattatggggatagctgcttttgtcattttttgtatcgtattctttatcgttatacgatttgaacttaattttcaaaggaatttcgaaaagcatacgacagatatgattacaagagtaaagaaagtaagtaatgaagcatttaaccaaatgccgattggtattttgttatacaataaggattatgggattgattgggcaaatccttatttatcttcatgtctgggacagcatgcattagctggatggcacctttacgatgtatcagaaacattacttcttttcattaaaggagaaacttctgatgatatagtctctttaaataatcgaaagtttcgcgtttttgtaaggaaagaagaaaagttaatttatttctttgatgtaacggaacaaacagaaatcgaaaagatgtacgaggatcaaaggactgttttagctgtcatctatttggataattatgatgaagttacacaaggattagatgatcaattacgtacgaatataacaagtcttgtgacatcgcgactaaatgaatgggcacttaagtatggggcgtatttaaaacgtgcatcttcagaaagattcttcgttgtgctaaatgaaagtattttgacgcagatggaaaaagggaaatttagcattttagatcaggtgcgtgaagaaacatctaaaaggaatataccacttacattaagtgtgggtgtcggatcaggtgatttacctttatcagagcttggagcaatggctcaatctggtttagatcttgcgcttgggcgtgggggagaccaagtagctattaaacaagcgacaggtaaagttaagttctatggaggtaagacaaatccggttgaaaaacgtacccgtgtacgcgctagggtcatttcgcatgcgttaaaggatttagtattagaaagtagtaatgtcattattatggggcatagggctcccgatatggacgcaattggtgctgcgattggtattttaaaagtggctcaattaaatgagcgtaaaggatatattgtgttagatgaaaatgattccgataaaggaattaagcgtttgatggacaaagtgaaacaaaatgaggagttatggtctcgttttattactccagagcaagcgatggaatttgcaaatgatgagtcgttacttgttgttgtcgatacgcataaaccttctatggtgatggagcaaaaactgttacataaaattgaaaatgtagtagttattgatcatcatcgccgtggagaagattttattgaagatccattgctagtttatatggaaccatatgcttcttcaacagcagaattggttacagaattacttgagtatcaacctaaaaatttaaagatgacaatgttagaagcgacggcattgttagcgggtattattgtcgacacgaaaagtttcacattccggacaggggctcgtacatttgatgctgcttcttatttacgctcacatggtgcagatactgtacttgtacaagaacttttaaaggaagatatggatcagtatttacgggttgcaaaagctataaaaaatgcgtacatttataaaaatggaattgcgattgctaaagttgatagtgatgattactacgatcaagtgcttattgcgcaatcggcagacacgttattaacgatgacagggattattgcatcatttgttgttgcgaaacgcggcgagaatctcattggaattagcagcaggtctttaggtgaagtgaatgtgcagctaattatggaaaacttaggcggtggcgggcatttgacgaatgcagccacacaaatgaaaaatgttacagtagatgaagctgaggagaagcttcgatttgttattgatgactatttacagggaggcacacaatcatgaaagtaatttttctaaaagacgtaaaaggtaaaggtaaaaaaggagaagtaaaaaacgtaccagatggctatgcaaataacttcttactaaaacaaggattagctgctgaagcaacaaatagcagtatgaaaactttagaagctcaaaagcgtaaagaagaaaaagatgcagcagcagagcttgaaaatgcaaaagagttaaaagagactttagagaaattaactgtagaattaaaggcgaaatctggagaaggtggccgtttatttggttctatcacaagcaaacaaatcgtagatgcaatgcaaaaatcacacaagattaagcttgataaacgtaaatttgaaatggacgatgcaatccgcgcgttaggttatacaaacgttactgtgaaattgcatccacaagtaacagcaacagtaaaagttcatgttagtgaacaataaaaataaattaagcaaggaggattgcgtatgagtgatgtacttgctgatcgtacccctccgcataatatagaggctgagcaggcggttttaggggccatattgattgatcaagatgcgttaacttcagcatcagagttattggtacctgattcgttctatcgaacgaaacatcaaaagatttttgaagtcatgcttgggctatctgataagggagagccgatcgacttagtaatgatgacatcagcaatggctgatcaaggattactagaagaagttggtggggtttcttacttagcagagttagcagaagttgtgccaactgcagctaacgtagaatattacgcacgcatcatcgctgaaaaggcgcttttacgtcgtttaattcgcacggcgactcatattgtatcggatggatacgagagagaagatgatgtggatggtcttttaaatgaggctgagaaaaaaatattagaagtatcccatcaaacgaatgcaaaagcattccaaaacattaaagatgttcttgtagatgcttatgacaaaattgaacttttgcataatcaaaagggtgaagttactgggataccaactgggtttactgaattagataagatgacagcaggtttccaacgaaatgatttaattatcgtggcagcacgtccatcagtagggaaaacggcattttcattaaatattgcacaaaacgtagcgacgaaaacggatgaaaatgtagcgatttttagtttggagatgggtgctgatcagcttgttatgcgtatgctttgtgcagaagggaatattgatgcacaaagacttcgtactggttcattaacttccgatgattgggcaaaattaacaatggcaatggggagtctctcaaatgctggtatatatattgatgatacgccaggtattaaagtaaatgagattcgagcaaaatgtcgtagattaaagcaagaacaaggtcttggtatgattttgattgactatttgcagcttattcaaggaagtgggaaatcaggagaaaaccgtcagcaggaagtatctgagatttctcgtaccttaaaagggattgcacgtgaattgcaagtgcctgttattgctttatcacagttatctcgtggtgtagaatctcgtcaagataaacgcccgatgatgtctgatattcgtgaatctggaagtattgagcaggatgctgatattgtagctttcctatatcgtgaagactactatgatcgagaaacggaaaacaaaaatacaattgaaattattattgcaaaacagcgtaacggtccagtaggttcagtggaacttgcattcgtcaaagagttcaataagttcgttaacttagaacgtcgttttgaggatggacatgctccgccggcataaaggcagtataaaaaagaaacacatttcttataataagatgtgtttctttttttttataagaaagataaggctttcataagttaaatatataattcttacgaacgaaaaagtttttttatgaaaaaatgttcgcttttcggttgacttctttttcggttttggtacaattatattgtttgaatagatcgtttgaaaattgcggaggtgctttaataatgtcttcagtagtagttgtaggaacacaatggggcgacgaaggaaaaggtaaaatcactgattttctttctgagcatgcggaagtagttgcaagatatcaaggtggaaataacgcgggacatacaattgttttcggcggagttaaatataaattacacttaattccatctggtattttctataaagagaaaatttgtgtaatcggaaacggattagtagtagatccaaaagcattacttgaagagttaaaatacttacacgatcgtggtgtaagtactgataatttacgtgtaagtaaccgtgcacatgttattttaccttaccacttaaagcaagatgagttagaagaagcaagtaaaggtgataacaaaatcggtacaacgaaaaaaggtatcggtcctgcatatatggataaagctgctcgtattggtattcgtatggctgatcttttagaccgtgaagcatttaaagagaagcttgagcgcaatttagtagaaaaaaatcgtttatttgaaaaaatgtacgatacagaaggtttcactgtagaagaaattttcgaagagtacttcgagtacgggcaacaaatcgcgcaatatgtatgtgatacgtctgttgtattaaatgatgcattagataataatcaccgtgtattatttgaaggtgcgcaaggtgttatgcttgatattgaccacggtacgtacccgttcgttacatcttctaacccaattgctggtggtgtaacagttggaactggagttggtcctgcgaaagttactcgcgttgtaggtgtatgtaaagcatatacaagccgcgttggtgatggtccattccctactgagcttcatgatgaaattggtcatcaaattcgtgaagttggtcgcgagtatggaacgacaactggtcgtccacgccgcgtaggttggttcgatagcgttgttgtaagacatgcacgtcgtgttagtggtttaacggatctatcattaaattctatcgacgttttaacaggtattccaactcttaaaatttgtgttgcttacaaatacaatggtgaagttattgatgaagttccagctaacttaaacattttagcaaaatgtgagcctgtatatgaagagcttccaggttgggaagaagatattactggtgtaaaatcattagatgaacttcctgaaaatgcacgaaaatacgtagaacgtgtttctgagttaacaggaattcaaatatctatgttctcagttggaccagatcgtaaccaaacaaatattgttcgtaacgtatacgaagcttaattaatagtgtttagaaaaaaactcatgtccgcatgagttttttcttattcttttataaaaaaacgaaaaaagtattgcaataaatacagaatacatgttatgatacatcttgtcgtcacgaaaatatgacgttggtgaatatgagccattagctcagttggtagagcatctgacttttaatcagagggtcgaaggttcgagtccttcatggctcaccattttatttttcgtggcccgttggtcaagtggttaagacaccgccctttcacggcggtaacacgggttcgaatcccgtacgggtcatgtttttttttgcttatttttggtcccgtggtgtagtggttaacatgcctgcctgtcacgcaggagatcgccggttcacgggtttataggtaaatccctttcctaaaaaacctaactttatcatacgaggaggtggtaaacaaactgtagtcattcaaaccggaatgagttgctcattttatgattggcttcctattataaaaaagctttcacagcactttacagtcgtttcataccatcgcccaggttatgggaaaagtgagctaggaaatcaaccacgtacaataaggcaagttacaaaagagctgcatatgttactaaacaaactagctattcaagagccatttattctaatcggtcattcctatggaggattatgtgcacaacattttgcgatgttacatgaagataagctgcaagcacttattttagttgattctacttcgatgaacttacaccgtttagatgaacttcatttaccaatttctgatcaaactgactcggatgatatgtggcttgaaaaatataatacatactccaaaatagatgtagacacactttataatgaactaaaacctattctcaccgatcaatcaaaacagcaaattggattctctacctcgccttcattatataaagcgacagcttctgaactatcggagtggaaaaactgtgctctctcactaaaagagctatgtaaaacattagaaataccattaatcgttatcggtagagatcctcaatattctattactcaattgactaatggtggcatgccaaaagaggaagcaacacaacttgaagcaatgtggcaagaactgatccatgaacaattacaactctcaatacatagccaatatatacttgccgaacatgctggtcacggaatcgaaattgatcggcctgatattattattggggctgttcaatctctataaataaaaaaaggaagcaactaaagttgcttccttacttatctattcataatcttcttcatcatcgatttcttcgtaataagcattcccattacttacataaatagggccattcgcaacatcaatacgtaatacccatgcccatggcacagctaaacgcttatgtattgctcgccaaaagctcattgattttctttcgtactcctggaactcctgaagtaactctttataggaggaaccgtctaactgaatatttgcttctagcaaacgagaatgggcatagtactgcagctctagttcagcagcaatttccatttcttcttctgttgccataccaataattgttccatctgctggtgcaatttcatatacgttgtgaacttcaataagcccttctttctctttctcaaacatgtaaacagcctcctttaacatatattttttatgttacaaagtcatacttctacaataacttctctctttcctctttttttgataaacttttacaaaatatttaaccgatgacctgttttctctattctttcagcagaaatgaaacgatttttatcaaaatttaatttatacacatcaggcatatgaagtgttttccaaaactccaaatcatatttcgaattaaaataattcattagtaataccataatattcccatgcgtacctattacaatattcttaccttcatatttttttaatatattttgtatacatattacagcgcgcttttgtgctacagtatttgattctccgccttcgtatgcaaaactccaatctttccacacattctgcatagcatcattaaaatttgatactggctctgtgctcaataatctttcacgcaaatcttcttcagtttgtattgataatttatatgtattcgcaattccttttacagtttggattgctcttttgtaaggactagaaataacaacatcaatatgtttatcttttaataaatgcgttacattttctgcatcacagtgccctttttcagataaaggtcgttcccgttcttcttttgtatatgtagaatgggcatggcgaacgaaatatattgttgtcatttttcaacctcctttcttattttccatctatattcaataataagattggaaaatcctgtattacaaaagagcatttttcataagtgcccctttgtttacataataaaattatttcattataatttatttctgaatttctcacttatgacaatatctcgaataaagtaatccatattacttagaagtttttcaaatgctttttcactcaaattgttcatcataaagacaatctcaatcttattcccttttttatcagtaccatagaaactatttgttaatacaaatgccgtagaaccacctttctgtccagcaaattcgaatataccctctcctacggttcctttaaatatattctcaacctcaccttgcatttgtggtgtaaaataatttctgctatttatcttttccaataaactcatgtaatccttagcatttgcacctataaaccgatctgaccaaatacgctgaaaatccatatcggcttttaacgatatctcgcgttttgtccattctttctcgtctttcatccattcatgtatttgccatacatgcttaacatattcatcattagacatattacgtagcttgtccaatgctttattttgaggaatatgcagttctttttcaacatagcccctcatatataatgcccctgtatacgttggataaaattcatcgtgactatttaagcctaactctttcaaactttcatttatccgcgctgctccaagcttgtccaataaatatgatgcattcgcattcgaactataatggatcattcctttcactacttcttctaaagaagtttgaccacccttcactaactctttaccttttacatcatctagccatgcagggtgtgcaccaccatcagtatttttctaattctttcaatgaaattttctcgtcttttcttatttttccttcagctacttgcttagcatattcaattgctataacgattttcgacatacttgctagcggtaatttttctttttcatttattgatgtcaatgtttcaccatttcttttaacaattaaagaagttgttttatcatccttatgttcttttatgtaatttagcacataattagagtcttctttggaattgacatattccttcactgaaaagaaagctatacagcctactatagtaattccagctataattccaacaacttttaatcccctcatgatactccccctaaaataaacatattatatattatactaaataaatttccctttttaagtaataattagattatttatacaaaaacacttcttttcttaaacaacaaaaaaacatgccttcattaggaaagcacgttttgtgatattcttcacattgtttagttaaaaaataaatgtttacttaccatgatgtaacattaaatcactaagttcttcttcaatgtgatttaatttcgcaacgccttctttccatttatgaatataacgtgaaaccccaacgaaaaacaaaacaataattgtggaaagaataataccatatacgattgctacagtactcatagttacacttccttataattagtaatgtggttattagttatatttttattataaacctttttcttttaaaatacttcgatttcaactttttgtaacaaaattgatttttctaacatttcgttcgtgaaaatggcatatttttcacaaattatacaaaacttcaccatatgtactattaccatatgagttatattattaaatagaataaaggggatgatatactatgacgacttggtttattgtaatgttagttgtatttggagcatttaaaattatcgtttctagccttcctaacactgttattgaatccattattagcaagtacgaaacacatccaaaacttgaagaagagaatgtgactattacaattcacggaaataacgtagaaggcgaacagaaatcaaaaattattcatgattttaacgaaggtttatttttagatcgctattatgcaccaccacacaatgagggtacgcctttaattatcaatgcaaaacgtggcaaaaagaattttacattttatatttatagtcacgaggagcatgttgatgttgtaaaacaatataaaaagaaggtagttgcttatagtttacgctctaaaaaccttcaaaatagtgatatgttcgtgtcagctgacttagcttaatactcatatattggaaaaaggaatccacgaaatatggattccttttttctcatttactgaaaaataagctctgtcttcaaactatctttcggtaacaaccagccttttttctctaaactcgccattaataattccctttgctttgtcgcaatactttcttcatttgttttaaatgacacttctattacgaagtcatcttctaattttccggtattacttaatggccaaatttcaatatttgcttttatgttttcaaactctcctgtatatcgtttcattaatacaggaccgtaaatacgggaattctttaacatttcttctccccaatttgtatacaaccatttgttcattttccctggtaatctttctattaacatgttttgagcagcttgttcatttggtaaatcaagtatcccatatcctttagcgctgtaacttttcttatttgaaatgcttaatgttttcttctcaaatccccaatctatttccgcctcataactatccgtattactatcgaatccttcttttttagctacttctagtgcatcttgaattacaccatttggaataggatatctttttttatatgttaattcaaaatctttactaaattctttctttcgaattctagcaaaccaaccttcctcgcttaaacttttattcgcagtatctaaaaattgcacttgtattctttcatattttgtaccagcctggaaatgttctagcacctcttgcttcatctctttgttatcacctaatacttgttctggcttcaataataactttacttcaaaactaggtttcattggactagctgcaaacccttccttaacgttataaaggaaacaacaaaagaaaatgcttacgaatacaaatacttttttcatatacctatcccctttacatttcaaatgacttctatacgttccattgcaagtgaatatacattttcataccctgctgtacttagcttttgttgtaatcgatccgtatcctctttcaaagcgtgcactaacaccgtatgttctggtaataatgtatttagcatctctttaacgtctcttatactttggtgaactttatacggaactctcttcaccctacatgtactccttacatgttctttcataactttttctgcaaaactccctttcgcaatatgcccagtaaaaataacggcattccgtttttcattccgaagttgttcatagtataactgtgctcgtttcgtttgcatattcgcatcactcattacaactattccgtaactattttgcatactaatgtcattatccataactattatgtttctttttaaactctccataatccatttaagttcttcattattttttatccaacctttatatatgaacatctcttcaaatccagccaaaatttctttatctactataagcggaaattctttatatcgttcatataaatacaatactatatcttgcgccctaccaagttgtggcagcggtaataatgctattccttcattttgcataactcgttcaatttctgcacatagatcgtctaatctttcattttgcgaaacatcatctgtgtgataagcggcatctacaattgcaacttttatattgtggcccaatttctcaggtaaattagctcgtagtatgttagactctgctgaatagtcgcctgaataaaatacgtatgtattacacatatcaactaaaaaccaaacagctcctaatacatgcccactatacccccactgaaaccgcaatgtaggagtaatttgtaaccattcatttggattgctaatctcatcaatacatacataatttaaatcttttatatgttggtcgctataaggtaaattccatccttgcattacattatagtttctccatttttcataatataacggcagttgctccttcgtataacgagtcgtccaattttttttcttatagccatacttcgctaataaaggtaaacccatcgtatgatcttcatgaatatgtgataaaaataccgcatctaaaaatggaacagcttctctctctatttttggataaccatcctcataagatcgattaataccacaatcaaatactattttcgtctctttattttttacaaaatagcaagagcgaccgtattctcctgctcctccccatacttccactctcatcatgctaccccttttcgcttttgctccatatgttgcagcagtaataagcacattgttgtaagtccaacagaaacaacggccatcgccattcctatagatacttcaccctgttcaaattgagcaaaaataaacgttgctgacgtttctactgatggaggtaatacgagaagtgatgctactaattctcttattgaaattgtaaatgtcatcgcccatccggcaagaatgcctgggataataagaggcaatattatttttctaaaaatataaatataatttccagaaaaaatacttcctgcctgcacgagagaatcatcaatttgtccgagtgatgattttacatattgcaccgtgtaaggtaaaaacagaacaacatacgttacgataaccatgattggtgtattataaattgacataggcatatatggtgaattccaaaatagaataagacctacaaccataacgattcctggtaccatattcggtaacataccgcacatatcaagccatttttcagaggtttttttcccctttcgaatcataagtgccaaaaagactccaatcattaccgcaataatcgctgttacgagtgaaaaaagaaaactattccataaagcctctaatcccggagaccccattgtaaacaatgcctcataatgacttgttgtaaagttatttacatgtaaaccgccgcctcttaattttgaaaaagaagcaataagtatagaaaagtatggaattccaattgatacgattaataaaccaattacatacatccatgctacaacgcgcgtaaatatagacaaagtatatcttttagatttcacaccttttccactaaccattgcatatgaatactttcgattcaatacattttgcatataccaaatgagcatacaagcactaagtaataaagaagataatgctgttgcactactgaaatcaattggccaactcgaaataaatttatgaatttctgatgttaacacgtggaatcctattctacgtccgaatgtagccggtgttccaaattcagcaatcgtctttacgaaaatgagtaaagcacccattacataacttgatactaataacggcaatattatttttcttaagcgatagaaaaaacttccgccatgaactgctgcagcttcttctttactactcccaatctgaagtaacgtgtttttcagcatgaaataaaggaatgggaataaatgcagactcataattaataccatacctcctaaactaaaaaacgatgatgaaactgtctttagcatcgggaaaaattgttcaaaatagccgttaggttgcatgaacaaaatccagcccatcgatccaatatacggcggtgtcataaatggaatcataaaaacaatatctaacttactatactttcctacatctgttttgctcataataaatgccaatggaaatgcaaatattgtagcacctattacaacgagtgcacctagaagcatcgaatttagaaaaatcccagctaatccaccactctgcatcacttcaaaaggctttaaaaaattccaactgctattttcatatacactagaaaataaaataagaaaaagtggaatgacgattaacatcgccacaagtaataacgctaccgtcattccaacttgtcttactgatacgaatcgatttaccatggaatcaccatcttattgaaatactttcttaaattgttttcctatttcatcttgctctttctcaactgttttccaatcaatatttaatactggaatctcttctacatttggtctattttcagcttttatatctgttctaccaggcaataaatacgctttagaaacttgtttttgtacatcatcggataataaataatcaataaactcttttgcaccttcaacatttttactatccttcataatcccagctacacgtgggctaataactgttccgctttttggatatacaatatcaacaggttcaccctttgcttttgcgctatacgtcatataatcaacacccgcaatgaccatatctttcgcacctgttacaactgggtctaacgcttcctgatttgctcctgctactgtaacttcatttttcttaagctgctcaaataaattccatccatcttgtccattctttttcacgtatcctgttacaaagtctaaagctgaacctgaaagtgctggatctggaagattcactttccctttccattctcctttcgttatatcgctccaatcttcaggcgctgtcttcacattttttgtattgtacacaatccctaatgctgaagcactatacccgaaataatggcctttatcatctgaccattcagaacgcagcttatcagcttgtttcgcctctttataagctaacgtttgaccctctttctttaatccttccatcgctggtaaggaagcgagtacgacaacgtcaacgactggatttttcttttcagcttccattctcgctaaaattttaccagttgtcccttgaaacatttccacctttataccagttttcttttcaaagtctttttgaactttttctgctaacccttttggccctgcactatatacaacaattttcttttcattcgtatttgtactttttgcatctgcattaccctttgaactacaacctgttactacagccgaaaataataaagtacatacaaataaagacttaagcgaactgaatttcttcatacgattctccccctatatgatgaatacatttttttggcacatataacgatactggtttaccgatgcttaatttactattgtgataagctgtccatattccgagtgcccccatgtttacttttatttcataccgttctcctacatatgtaacgtgcttaatttcacctgtatacatttcgcacacttcatttttcgtccaactcacatgctctggacgaaccatttttttaccctctacaagccaattcgccttaccaacaaatttggcaacaaattcatgagacggtttcacataaatatcttcgggtgttcctttttgtaatactgctccttgtttcatgacaataatttggtctgacattgacattgcttctgtttgatcgtgagtaacatacagtgcagttaaaccaatggaatgaacgatatccataagctctattctcatttcttctcgcaaaattgcatcgagcgcacttagcggttcgtcaaacaaaataaaatgaggttttgttacaattgctctagcgaatgcgacacgttgttgctgtccaccagaaagttcgtgtggataccttttctccataccttgcaggcgaactcgctttattgcatcttctactttttctcgtaaatgattcgtttgctttgtagctcttaaaccaaatgcaacattttcaaaaacagtcatgtgcggccataaagcaaaatcttgaaataccataccgatattccgttcatgaggagatgtctttatcttttttgtagcagaatacatgcactggtctccaaaatatatttctcccttatccggttcttcaagtcctgctatcattctaagtaaagtcgttttcccacatcccgaaggtcctaaaagtgtagtgaattccccttgtttcattacaatctgcaacggctttaacgcttgtgtttttccaaatgttttttctaatccattaattttaatatccatcgtctcacctctctcccctcattcttaacctgctttcattctatatggaagatttatacttaatgttaatgtactgtaaagattaaattaaaaaacttctaataaactatttatttctatagattttttctatagttaaaataaaaaaggcggcaattcataatgaatctcttaaaattagaaattgtagtacttattaagaaatacaaaaagcttacaatcgttgcagaaaaacttggcgttaaacaaccaactattacttttcatataaaaagcttagaagaagaactcggtgtgtctttattcgaattacgttctggaaggtatttcttaacagaggctggtgaggctttgcaccattatgcttgtaaaatagatgcacttatgaaagaagctagacgtgtcacgcaagagtttaaagattttcataaaggcgctataacaatcggcgctagttatgtaccagcgacttatcttttgccagcagtcgttcatcaatttcaatgtgaatttcccaatataaaaataacgctactagttaaaatcgcccctgaaattcgaatgatgctacaaaatcacgaaatcgatcttgggataatttccgctgctccatttgatgaaccacttttaaaacaaacgaatataatgcccgatacacttgttcttgctttttccaaagaacatcatttttcaaagaaagacaatgtatcgttacaaaatatagaaaaggaacgcatactattgcatcgtaatccatctacaacgagagacttacttacacaatggacgttagcgcacaacattacattccaatcagaaattgaattagactcattagaaacgatgaaacaaattttaaaatatggtaatggaattgccttgatttctaaactggctatcgaacaagaaatacaacgaaatgagctatgctatataccaatccctgaatttgaatttcagcgtaatatttatacgattcatcatgaagacagatggaattctaaaatcatttcttttttactacagagcatcactacatttgcaacaaaaaattaaaaggctgtcgttatgcacgacagcctttcaaactataaatctatttatttttctttgcctcaatttttgcttgcgcctcttcagccttatctaatgcttctgatactttcttctctttttctttcacttcatctatactatcgacagctttaataattttatcgattccctcttcttctacctttctacgctttgccactctttcatttactttctcttccacatcttttgctttttgaagcatattctctgcatttgatattacagctttttcaagttcatcatcttttttcttttgtaacacttcatttgcaatgtctttcgcttctaaatacttaccgtcttttaatgctgttgctccctgatccattttctcagcaacttctttatatgatttcgcttcatttcctgatttctctttttctgctttttcgaaccacattgttgcatcactatacttttcatctttcaatgattgcatacctgtttcaatatatgtgtcataattgctacatccagccattacgactaatagaaaaagcataacaaaacttaattttttcatgctgttgtctccttttctttgcaagctcactttactttaacatacatgaaaaagagtttcaaaaactaaaatactaatttagtcatttttattttattaagtcacatttccttttagacagacacatccacttgctttttcattacatgcttctttactcctactaatacaactaacaataaacctacgcctaatgtcatcataacaatgctagttggcaacatatctaataataatccatacacaatcataccgagcggtgcgattgcagtagaaattgtttcaagtaagccgaaaacgcgtcctaaataacttggatctgtcgtcttttgcaaatgtacttgcatcgggatatttacaaccatcattgatataccagttaacatcataaaagcgatatagtaaataaaacttgctactttcgggatggtgactactaatggaaacactgtacataaactcaaactcgcaaataaaaacaacccaatataaacagagcgaaacggatcattcacttctttacgtactgataacgcaattgcaccaattaacatcccaactgctaacattccctctacaacaccgagttgtttcgaagatagatgcaaattttgaacaataatatatggaagtgaaacgaaaagtgcactcgcaaaaaagtttacccctactgcaattttcattaaaccatatatttcatgctgtcttttcacatatgaaaacccttcttttatactcgtcaagaaatgctctttactttcagccttttcttttttgtataaatcaaatacgataaacaattgcacaacaaccgctaaaaagaatgtaatgctattcaataggaaaaacgatttaattgaaaagaaaccaaatacaactccgccaataatcggtgctaaaatatttgataaagatgctgccgtctggttcaaggcactcgctttttgaatacgtccttcatctactaaacttggaatagatgaagttaatgaaacagagtaaaaactcgcacaaattgataataatgctgctgaaacataaataaacagaagtgatggcccaaaagtagttgcaaggataaacataataaacattgttaaactacttaacaaatcggtaccgatgacaagccattttcgattgacgcggtcagctacagcaccagcaattggtccacagattagccttggaatcgatccacaaataagcgtagttgcaaaccccattcctgaacccgttgtctttaatacgtataatcccattgcaaacgtataaataccggctcctagcaaagacgtcattttcccaatcatcattaaaataatatttctcgttgcaatcttcattcttgaatcattttgtcctatacttatatcccccatttttgacactctccccttaaaagttaaattgtgttaaacttattatataattaactttccaatttttacaacaaaaagtttaatgacatttaactttctaactataaaggagcaattatatggctactctcggtgaaaaaattaaaacgttacgaaaagaaaaaaagcttactcaaactgatctagcaggttcagaactcacaaaaagtatgctaagtcaaattgaaaatggaaaagctacaccttctatgaaaacactacaatatatcgctgacaaacttgaatgtgaaacgagttttttattagaagaagatgatgtagaaattgtaggactcattcaacaaacggagaaactaataaaagcaaacaagtacgatgaagtatatgaggttttactaccgatcgttcaaaaagagctacctcccactttgaatactgctcgtttatataaacagtttgtaacagctgcggctaaaatgaaagattacaatattgaatattacgttgaaaaggctacttctatttttgagaaatatacgttataccgggatagtacggaaacaaaattaaaattatcctttacgatattcacacgtaaaaaatatgctgaatgtttacaacttatagctagtatccgaaatgactatgaagagaaacatttagaaatggatctcattatacatatcgaattatatttatatgaagcaattatttttcttgcatgtggtgattacgaacaatgtgaaagtgtcattttagatgcacttgcattttcaaaaaaacatcaagtgtattataaaacagatgaattttatcgtattttatcttatcaaaaagtaatcacggctgataaagaacaatatttacattacataaaaaaatcagagcaattcgccatttttacagaagataatttctctgcggcggttattgatcttttaaaagctttctactacaacacaattgctaatgaatatacaattgcattagaacatttagaacaatttcgagaaaaattaaaagatgagccaatttttcaagatgatggatcatattatcttgaaaaaggaaaagctttgtatggtttaaaacaatacgaagaagctttaaaaacattgcaacgcgctatcataccagattatataaaccatccacttgatcacgcacggcttacaacagctggggcatatcgcgctctttgttatgtgaaacttaatgataaaaaaagagctcttgaagaagtaacagaagcatatgaaatcgtacaggcctatcctgattccatcttcacttcatttattaaagaaacattacaaataatacaaaaactttaagaatgtctctaaatggtatattattcctcttttttagcaaagataataatgatgggaggaatataaatgaatatacaacgtgcaatagagctttctatgtcagcagaacaagccaatgtcaattttcaaggcatgcctgttatgattcaacacgtcgatgaaagcaatgaaaccgcccgcatatatgaagtaaaaaacccaggacgcgaattaactgttccagttaatagcttagaggaaatataagaaatgccacttctcttttgaagtggcatttttcttctttcagattacttattataaatttcttcaactctttattttacatgagctgaaaaaataagaattttctacttcttttctttttgtgacctgctaaaatacaaactatggattaattattcgtactatacattaaggaggaaaaataatggcatctaatttagaaaaaaaccagccttattatgcagttatattcacttctaatttatcaaataatacaactgactataataccgttgccgaagaaatggagaaacttgcaaagtaacaacctggatttttaggtgtagaaagtgcacgaggtaattctggactcggaataacaatttcttattgggaatcacttgatgcgattgaaaattggaagaagaacaccttacataaagaagcgaaaaaaagaggtcgtgagcaatggtatgaaaacttccacctgcgtatttgtcttgttgagaaagaatttaagtttcatagaggtactttataactatgaaggaaaaattagctctcgttattgttcatgaaatatatggtgtgaacgaccatatgcatcacgttacccagcactttacttcatctcatatagacgtattctgtcctaatcttctacacttacaacatgcatttcattatcgtgatgaagaaaaggcatatgaacattttgtaaatcatattggatttgatgatggaaaaaagcaaattgaagaattcatttctcatctttctagtagttatacacatattggacttatcggctttagtgttggagctaccatctcatggctatgtagtaacaatccgaaaatagattttattatcggatgttacggttctcgtatacgcgactatgttcacataaagcctacatgctctacattacttatattccctgaaaaagaagctagtttttcagtatcctctttaattcacacattgcagcaacaaaagaatcctttattagaaataaaacaactacacggtgaacatggatttctaaatccgtacactgaaaaatataacgggcactctacaaaacaagcatacaatttaatagattcatttcttgtaaagtgaaacttcaatcagtggggggggggcatcccccacctaatctcttttcttacgttgagttttaaggtgtgggtcttactgcccatgcgtgataaaaacaatcttatacaggagactcaaaatgacgctgacattactcttacttgttttcatactcattgcctttatctcagcgctaactatcatttttaaaaccgtaaaaaaagggctatttttcaaccgcccctacttacaatctattatcgtttgccttttattttttactaattggatcttatatgtaacaactttttattcgttacttcccgagaaaattagtgagttcctattcctacccatttggtttttcctttgtattttaggttttataactttctggcgtgaatggggaaataatcgtgtattctccatatgtatcggttttctttccttgactagttttttatttggattattgttgttagttctttccgggatgtaatagaagaaggaagaaaagccaactttcaacttttcttccttctatgtttacctttagttttcactgtcactgattcacaaggtgtataatatatttgaggtgtcgccttatcaacaaacatcataaacgtaataaagccgataataaagaaaataaataacgttaacaaaattgctcctatcgttaaaagtatcataacaccacccctatatttttcatgttattacacttttcgctatgatatgagtgtaatcctttttagaaaaggaaacgtaacaaaataatcacaatcactcccgttaatactgtacctaataaactacgagtatatatcgctacaagaaatgttggaattgctgcaataagataatcccactgcatcgtttcatgcataaataaaacttgtgctaaaagcgctgctaatatcgcaattggtatgtaatttaaccattttaaaccccagtcaggaatttgtagtttgctaaatacgagtagaggtaaaatacgtggcacgattgtaacagctcctgctgctagtaaaagtaataatacatctaatctcatttccatttttcaatcaacactccaatcgtcgcagctagtaaggttgcgataataaccgctatactatctggcataaataggtgtgaaacgtatgcgataataatcgctacaattgcaacacttaaatgaattgctagtttcggtttactacttatgagctgaagaacaaataatccgataaacatcgctggtaatgcataatccatgccgtatgtatgtggatctggtatccactcaccaaatagcccgccaatgatagtggcaagaatccaatttaaatacgctgttacattaagccctatcatccatctttcacctaaatatcctttttgcgcagcatgctgcactgcaacgccgaaagtttcatctgtaatttgcgaaccgatgattaggtttttaaatagaggaattttcgtaaagtacggtgcaagtgcagcactcataagaaggtggcgcaagttaacaaaaaatacagtaaaaataattgcggaagcaggagcaccggctgcatacataccagctaatataaattgggcagaacctgcataaattaaagtggacataaatgcaatttcaatgatggagaaaccagctgtttttgcaattacaccagctgctataccgatgctcaagtaaccaaatacagttggtaaacaatcttttactccttgctgaaatgtatcgtcactctgcaaagctacatgtgcctgagctttactcatctctatcatcctccattccttctaaagttcgttttcctgttacgacatgaactaaatctatattttcacgccataacgtatctaacttatcagctccaaattcctttgtgatttcttcaaccataatatcgtgccgcacatactctgtagcaacgagaactagcgctgggtcatacgttgtaacggcccatgaagtgctatcatttgagaagttcgcaattaatacttcctctccatcacgagcaataacagttaaatgaccacccattctcttttcaacaacgtggggcgtcatataattatgatgaaacgtcgctcctatttttgtttctggagctccaaataagattgaaaatatatgtacgccttcctcttccttttgatgaatgtatggctcaatttcatgcacttgttcttcccatacagaaatccataattcttcctttgccctattaattatattgcatatttcttttaaaacacgatcatttgagcgaatatgcgaaattacatctatttgtcgctcttgttctaaacaatttaatttctcatctaaaaattcaaaggacttttcaaagtcttttcgcattcgattcattaattcggtagctggtactggtacatatttaactggttcagaaggtacaatatgcaccgctcctttatccattaacttaccgagtacctcgtaaatcatagaacgaggtactcctgtttgtttactcacttcatagcctgttactggagaatgttttaacaatccaatatacgctttacattcatattgggaaaatcccaacttttgtaattcctttataatttcatccatcggtaacccctcacaatctaaatcgctcttacttcaaaacgacgattttgcttccctttactttttactttatcaataacaagtgttcctatttcactcgtatttttcacatgtgtgcctccacaagcttgttcgtctaaattttcaattgtaacaatgcggatttcttggatagtagttggcaggagatttattgctgttttaatcattcctacagcattttctgcttcttcgcggctcatataacgagtggaaatttctttattttgcttaataagtttattcacttcctcaacaatttcttctacttccacgctcgataactcttgtaactcattaaaatcgatacgtgctttatcaggataaatttgatttccggtgcataaagctccatacttttcataaacaacagctccgataagatgcagtaaagagtgatgacgcattaaattatgacgtctttcccaatttatctctaatttaactggacctaactttacttgtgcttcgtcttttatatagtgaactatttctccttgctccttctttactttttcaacttcaaatacagacccatcttgtacaatgacacccgtatcacattcctgtcctccaccagttggataaaaaattgtttcttttacaaatactttattcccttctactcttatcacttctgtttcgcaactcgttttgtatgcatcttctaaatataatgccgttgtcatactctcacctctttagtagttatagttatacctactaatataaaaaagaagctctgcaaagtcaattgataattctgaaatttaaaattaataaaagactcctttattaggagtccactatctcaatatttcattcgcttctttttcataaattttatcaaatgacgtcataacgcgctgtgatgcttgaatcatcttttgatctgtcataagatctgccatctctttcgtcatatcaacatttgaattttctagcatatgattttttactattcctgttccgttcggtaaattagcaatgtttccttctgctagtgtaaagcttttgttttcacgttgcacgagacgtgcattcgtttcggcatctactgtttttgtttgcaaacgagcaatattattttgtgttacctcatcatataatgtaccatctgcttgtacagcaacctttgctccttctggaatacgaatacgctcattattctctcccattacgaaagcaccagatgatgtttgtaaataacgatcactatttaatgtgaaactaccatctctcgttaaaaacgtttcatcatttttagaagtaacgaaaaatgatgttgtgccggccgcgccgtcatctaaaaagaaatctgtagcgctatttgtcatttgtatatttccttgtactaaattcacatgcgttgcagctggtactacagcgtaatcgaccgaaccgatatttgttaccgccccatctccgcggcgatatgtgtcttgtacatcaaatactttagacgtcatattttctgctttaaatcctgtcgtttgagcatttgcaacgttattcgaatgaacattaatgcgctgcatgtaattcatcatgcccatagaacctatataaagaccgttcatattcgtttgaataaggcaagcgccttattcttcacctcttttctacgatgtttgtaacatttgtttcgctaaatgttcagctgtagcgatatgtatatttttctttatgtcttggccatctgtcattaatacaataggagctgatgatactgctggaattttcaacaattcgccactacttgctgtttcatcaaatttcgtaaacacaataccatctatatgaatatctttaaagtttgtaataatttcaatcatatctttacttttcattgaagctgataacgttaaacaaatataatctggttctacttgtcccatcgtttcaatcatttcttccactgtttctgacgtacgataatttttccctgctgtatcaattaaaatataatcgacgcgtgcttcttctttaaaatacgtaagcgctcttgtcattgcagcttcatcacgcacagcaattacttcagatccaattgtctttacgttatcttgcaattgctgtactgttcctatgcgcgaatgatctgtcgttataaaaccaactgtttttttcttaccgtgaaattgccatgccattttcgcgagtgtcgtcgttttaccaacgccagttggaccgattaatgcaattgtttgtacttctttttcaaagacgttttccgtattgaaatgagatttcatatcttccaatatgtacctgataacttcttcttccgtaatcatcgttgcattttcaaactttatttttaacttttcagcatatgcatgaatgaaatattgttccacatcgttttgttctagcatccgaattactttttgaataataaacggtacagattcttgattttctttctttggaactacttcttctttctttactggaacgacttgtttcacaacttttttctttttcgttactttcgttacttccgtttctttcatcggtttcacaacgacgattcctttttcaaacagctttaatagtttctctttttttcttgcccattcttcactatttcctgtttgcatcgccgcgtatgacatagaagtcgttacgttttctaaattgtgcagtactgattgaattccattcgccttcacaatttgttctgaaggatcattcacaacatccattaactgttcatgaaattgagctgtaccttcattcacttcttcctgtttttcttctggaaaagcaactaacatttcataatcctttttccaaaaaaacggtatatttcgttttacactttcatcgacaacataataataatctgtaccatattggtcaaataactttcgatacaattcatttttcgaagctgcttttattcgcattaacgcttctttcttttctgtactttccattacttcaccccctactattcaatataggcaatttgatccacaacaatttctggtgctaattcactaatacaaagtacttgtgcttccacttgataacgttctagcagtcttacaatcgcaaatctaaaatcttttctacgtgttaataacactggttctcttcccattaaacgtgcttgcttaaagacgcgctgcacttgctcaacgacacgtgtttctaaatctaaatcccagtttaataagtaaccttgatatgaattattcacaacatccgcatctaactcgattgaatcagagaagagcgctgcatatatttttccgtccggatttttcgcattttcacaaataacttttgaaatacattcacgaacaaatgatgttacaccatccacgtggttttgataaatttctttgccgtcaataataccttcaataattgttggtaaatcacgaatagaaataccttcttttagaagttgtttaataacattttgaacaagtgataaatcaatttcttttttcttaatctcttctaatagaacgccattatcattttcaagcgagttaattaagtcttttacatgttggcgctgaattaattcatgaagattacgtctaacgacaacatctaaatgtgtaattaatatgctaagtggctctaaaacttgatagcctttcatttgtgcatcttgcaccatatgctctaaaatccaatatccatcttcaccgaaaattggatctttcgctggctctgcatctaaatcagccattacgtttggtgttttcagtgctaataaataacctgattttaaaacaccttcagccgccttcgcacctttaattcgaataatgtaacgtccgcgtggcctaaagctcgtattatctttaaagttaattccaggaacgttaataccaaggtcagtaataattgacttcctcataagaacaactttatcacgcgctgtttccccgttaattttttgctttacaagtgctgctaaatctaaaccgagttctactataattggatatttatccgtaaatactccgaatgaatcttccacttgttgcagttgttcatcttcgccttggatcatttctatttctttttgaagctcgtcttctttttctttctttattcgatttttattacgaattcctaagaagataattgttccgccaacgagtgcgaatggtagaaacggtagcggagtaaaaatacccattgcgataaataaaccaccgagcgcatatacaacgacttcatgcgctaataactctttaaagataccttctgttactgtatccggtgaaccgtcaaatacacgcgttacgataatacctgttgaaattgcaagcattaacgaaccgatttggtttacgattccgtcaccgacagttaactgtgtataatgaagagccgcatccgcaaagctcatcccttgctgcatcattccgacaattaaaccgaaaataatgtttacgaataaaatgacaatcccgaaaataacgtcccctttaatgaactttccggcaccatccatcgccccgtaaaactctgtttccatatttaatttttttcgttttgcttgtgcatctttttctgaaataatacgctggtttaaatcagcatcgatagacatttgtttccctggtaaagaatcaagtgtaaaacgagctgcaacttcagctgtacgagacgcaccgtttgcaacgataaactggaatatgattaatactgtaaaaataacgataccaattaataagtttccgccaattacgaactggccaaactcttcaataacatgacctgcatttccatctgtcaaaatcgctcgcgtcgtcgaaacgttaatcgatacgcggaaaatcccgattaataacaacatcgttggaaatgactttaattcatcccactcgttaatacttgtcgctcgcatataaataagcactgacatacttagtagaaaaacgataatgatatcaagtataaatggtggaagtggaattaagagcgccactacgaatgacgctgctaaaaagatagaaaaataggttcttgcagaatctatcttaaacaaagagatctcctccaaacgcgctattatacttcaagttcattcgtctgaattaaatagcgcataacttcaattacagctacatataaatcttctggaatcgtctcatcttcctcgacttgataatataaagaacgagcaagcggacggttttccaccattggtatttcttgttcacgggcaagcgttcgtatatataatgcgagctcatcttccccttttgcaacgacaattggtgctgcatcaacgtgtttattgtaacgaagtacgaccgaaatatgagtcgggttgtttacaataaacgttgcgccatccatcttcttcgcaattgttccttgcaagattgcatgcataaagttttttcgtttccctttaacttgcgggtccccttcattatctttatgctcttgtttcacttcttcttttttcatcttaatatcttgctcgtactcccatttttgataaatgaaatcaataatagaaagaacgattaaaataattaaaattgctaagaaaataaatttaatttccctaataatttcagtaagggatgcagtccagttaaatccaatcatactgacaattttctctaaattctttttaaagagaacgtaagcgacgtaaccgattaatcccatataaaatagtgatttcaaaatatctactaaacttttacgactaaacagtctcgtaaaatagtttttcggattaatacgtgacgctttcggtttaatgactttagaagaaaataggaagccgacttgaatcatataattgaataaatgaaaagcgtatacgagtattaatatcggagccgatactttcagtaataaaatccccattaaataaaaatactcggttgaatctgtattttttccaatttgatcaaacagcaccgctacggaatttgcaatctcataccctagccaatctccgaagaaataaacgacaactgctaatacgagaatggaaaataaattatttaaatctttactccgggcaatgttcccttcttcacgcgattttttacgcttctgcggggtggccttttctgttttattatcctttgccatgcgcgtccccctacttcgttaagaaaaagttaaatagtttcgtatactcttcaagtaatacatccgtcatatttttaaacacataaccgagcatcggtacactcatcgcaataaacaaaatcccacatgtaattttaattacgtatgcattcataaaaacgtttaattgcggagcgttttttgcaattaaaattagaacaaagttaatgatgaataaacttcccataagcggaagagcaatttcaaccgctgatgtgatcgcaaataatagcgttgcgagtagactatctaagaaactagtcgtcaacaattttgaaatcgcctctgtatattgaaacgactttaaaatcgtggcaacgaaataattaatgccgccaagtgaaataaaaataatgagaaaaaatatatcaaaaatggttgatagtaaagtagactgtgagcccgcatttacatcaaacaaacttgcttgtgataaaccgatatcaaagtctaaaatatgcccggccattttcggaatgttccacagcatttctacaatttttgaaagtgataatccaattacaatttgcgttcctgcataagctgcaacgtcccaaactgtcttgatgtgagagacatccacttgatcagccactgtaattgaaagagcaagtccaactgtaaccttcgccattgctggaatggatcgtcctgagaaaaacggtaaaaaatataaaaatgaagtaatgcggcaaaacgcaaaaaacgttgccgcccataattccatattcatttcagttcacctatcttagtacgaacgcaatagcgatgggattttatcaaataaatctaaaataagtgtcgttaactcttggaacatccacggacctaaaatgataataacgaggacaatactcgccattttcggtaaaaacgtcagcgtttgctcttgaatttgcatcatcgccataatgacagcgatgataataacgacaatcatacttacgccggcaaccggcattaaaatcataacccctttataaaaaaaggtttgaaaaatatctataattggtgacgtattcatttatatgactcctatcacatagcatcaaacgcttcaggcgaccgttttaaacataatgtcgacgatttttgtatatccacctaaatatacgaaaacgagtattttaaacggtaaacttaaaatcatcggcggtaccatcatcatcccgaggtacattaaaagtgtactaataatcaaatctataaatacaaacgctaaataaatgaacatccctgttagtaaacctttttgaatttgcgttaacgtaaaggatggtacgagcgtaaatagtgaaagatctttcaaatctttcggcaactcttctccgcgtactttcagcatcatttttaaatcatgcttatacgtatgctttgacatatattctttcataataggagctgtcgtttccgcagcttgacttactgttattttctctttcgtcatcggatcccacacatcactcttcagttgcccgagtacaggctgcatcgtaaagagtgataaaaataatgcaagtccaacaagcacttggtttggtggtaaattcattaccccaagtccttgacgtgtaatccctagaacgatcataaaataagtaaaatgtgtaaataatagaacgatagaagaagataatgataaaagggtaacgagcgcaaatagttgtacacttgaattactcgtaaactcttttccattttcgaaattaataaaaccgttcggggctgcatacgctggatttacaaaaataattgaaaaaacgatagaaaatacgaaaataacggctaataatgataactgtttctttattctcatgatggatcctctacttttttcgtttcactcttcaccgcgtcttctagtgcttgttgaaactgatttcctgttccggttaattgcacagactgcacaccgttattactaataacagtgaacacttgctttccgtccacttcaaataaaaaggcactcgtttgatgatttaaataaacgccgtcttttacttgtatatggccattttcaccctgcttaaaaaactgctgtttgcgcgtctttttcgtcatataatatgcaccgtagccgagcgcaccaaacagtaaaacgacttgaaataaggtcgtcatatacgacatatgactcctcctctactctttatcttgcatttgactttgcgctttcataagcgccgcttgtttcttatcagcttcaatttcagaaatgataataccgaatttctcgtccattacgattgcttcaccgatgccgactttcatattacttaaatacacatctactttatgtcctaagtttttctctacttcaagaacatcgccaacttttaactgctttacatcaccaagtgtaatagatgactttccaagctttacaccaagttcaatcgaaatatctgaaacagtatcaatatgtgctttacctgcttcatttcgctttcctgcaaaatcttctaatcccattaatgacacgggagatacttcatgcttcatatggatcctcctactctacaaaacttttaaataggagcgccttacgcgttccatcttttccaataaaacaattaaatttatgctttccatctacataaccaagtaattcatccgaaactttcgtatgaagcggaattatatcgccttcttcaatttgttcaatctcactcattgtcattttctgctcaccaattgcaacgtgaacaggtttgtacacttgatttactttcatttccacttcagacatatactttttacgtttatctgaagaatgttcgacaatattttcagacgttaacttatccataatttcttcaacagataagaatggaattccgatacgcaccgtcgtattccaaaaatctgttttcatatttacgttaagtaatgaaatgatatcactcgctgtcgtaatctttaatgcattcggatctgtttctgtcgttacaaatttcggttcaatcgcaacaacactttcaaatgattgctctaaatttttacaaagaagcaagaatatattatcaagcgttaaaaactcaaacgctgttaacggtctgcgcatcgtaaagttacgcttactatctccgccaagccaacattcatgaatataaataacgaatgctaaatcaatctcaataacaatttctccaagctctggtaaaccgagatcaattacgcaatataaataataatctttcggcattttctccacatattcactcgtaaatggaacttgctcaactgttgaaggctctagttcaattggaatacgcatacgcgctgataacgtctgtgacgtctgttttccaaaagtagaagcaatcgcttgcaaactacgtaaatgctcaacaccgaacttctctggtctattaaaatcatactcttgaaatttctcttgctttcctgcttcttgtgcgaaagctggcatttcctcgccttcatttaccgccttcagcagggcatcaatttgctcttggcttaatttttcgccactcatgacaatccccttccctaccttttcaattcaacgatttcaacgtacatttttccattcttcgttaaaatctttccggttccaatctcttcattctcaagcataagacgcaccgtatttttcgttgaattttcaagacgatacaatgtacctttcgtaatatgaagcagatcttcaattttctttttcgtatttccgatttcaaaataaattgttaacggaatatcatcttgtaatttcaaatctagccaactcccatatcatgttcacgaaaatttcatgttctctctatatatgaaacttcttattttgaaacgtcgatatttaatatttttttaatatatccttgcgtttctttaaatggcggtacgcctccgtactttctcacattaccaggaccagcattgtaagaagcaagtgccaatactaagtcaccgttatttttctttaaataaccacttaactctttcacgccaccttcaatactttcagctggtgaaaagggattcttcacacccatctccttcacattcgctggcataagctgcataagtcccatcgcaccggcatgtgacaccgttttcggattaaaattagactctacttcaatcattttttgaattaacgttttcggaattccatatgtacgacttacacgatcaataatatcctcatacttcccttcattggaagaacgtattttttgaatattatacttcttcgttaatccccacgtatcagcagcctcatttttcgtttctgggaaacgtcgttcaaactctttttgcgcaacttgcacttcatctgctttcttcgtttcacccttttcttcgggcttactcgcttcatctacttttttcgtttcacccttttcttcgggcttactcgcttcatctactttattaatagattgttccggcttattaacaaccgtttctattttcgtagattgttccggctgactcatatcttctatttttgccggctgcgtagtagccttcgtctccctcgcaggttcactctgcaacttctcttgaaaacgactactaacaaatgcttgtggactacttagcttttgctgaatttgtccttttttatatgcaagcacttcttttactatatttccaactaacataatatcaccttttcggtaaacaaagataatctaatattagagtttttttttaaagtttgcaataatccttttgataatattgtaataaaaaaatgaacaaataggaaattatcatttttttatattcattaattacaattattcgttgacacgatatacaccaaggattacaattaatctcgaaattgatttttttgcatatttacgtttaacaattaacagaaaaatcaatataaaaaaatgggggttcttaacatgagaattaatacaaatattaatagcatgcgtactcaagagtacatgcgacaaaaccaagacaaaatgaacacttctatgaaccgtttatctagcggtaaatcaatcaacagtgcagctgacgatgcggctggtttagctattgctactcgtatgcgtgcaaaagaaggcggattaaatgttggggctcgtaacacacaagacgctatgtctgctttacgtactggtgacgctgcattaggttctgtttcaaacatcttacttcgtatgcgtgatcttgcaacacaagcatcaagcggtactaacaacgataaagatatcgcatctatggacaaagagtatcaagcattagcacaagaaattatacaacgatagaggcattaatatcgctacaataatcgaaaaaaagtcttgataaaatggtgaaatggaatccgtttgcttcaataccgaagcaatacgaggaaatacatagaatgtttgaggaacaatataaagtacctaaaccttttttaacacaagatactatggaacgaatagaaagagcgttaatgcaatcttttcacgaggaagaagaaatacatatctcatactatcgtgatggaatggtgcaagacatgtacataaatgtattacatattgaaccgatgacgaaaactatatattgtacagatgcctttggtttgaatactaagtttaagtttgatgaattggtgaatataaattaaaagaagccgcccgacaggactgaagtgcaccccaattgttagacacagcctaacaattggggtgcacttcacatatataggtggcttttgtacgacaaaaaaaagagctctgctatacagcagagcaaaagaaaaatatataaccctataaaaataatacaaattattgatactttcaaaagacgaaatttaaatttccatcacaataatagctatgtttaagtatgaaacattctaccttcactatagctatgaatattcttattttagaattccatagtatccaaatagctctttgagagatacctcaataccgaacttcttcaaagaatcttttctttgttcaaagagaagttctaaaacttttttcttatctttgtctcttccataatgaatcaacctatgacagttcggacatatactaactatatttccaacaacatctaaactattttcaaaatcatgttgcattcttaacggtattagatgatgggcctccatataattttttcggctggcttccgatacaaatgtttcatgtgtgtcatctatttcacatttaaattctgcctgtttaatagcttgtttagcttttttcggatcacgaggccatacttccctaccagattccattttagttttttttcgattttccggtttctcttcttctgcaatctttactttactaaaatccgaatcaatattagcctgatacatatcttcctcttgctcatcctcagaaagaataaagctctcattcaacgctttaataatattatcaatagatttatattttgctaattttattgaatcaatatatgaatatataaatttaaaagattaaaataaaaataagtacacatgttttattaggaggtatatgtatgtccaacagcacttcatggctagatgaaattatagcaatattaaccgaactagatggagcaggaacactgaatcaaattaaaacaaaggttatggagcgtaataaaattgacttgaatagataccaacacgaacagtctatagctgcaagaattagaaagaccatttatcaggtaaactattataaaaacgttcaatggccgctactaaaactaaatcttctaaatgagcagttttaaggttgtttatttttaaaaacatcaaaaatgccaaatcccttatatcacaaaggatttggcatttttaagtatctagaacacgcgctaaatttaaggagaaattaacagacatgagtccggtataatgccgtgtccacacccaaggatcggttacataaaatagcgtatctaacctgggaagtctattggcctttttcccttatagtaacgctctcttctactaagaccttttctttctagggcctacaattaatttaatcgctgttctttcttcattattgatagaaatctcttgaaacgctggaacaaaagctaagtcaataccacttggagcgacgaaccctcttgcaatcgcaattgctttaatcgcttgatttatagctccagccccaatcgcttgaatttccacattaccacttgttcttagtactcctgctattgcacctgcgactgaatttgggcttgattttgaagatacctttaatatattttccatgtaagttgctccctctattatttaatctctctttcgttacaattttaaatattttagcgtatctttaattactattcacaccaaaaacaaacgatgcttcatatgtatattattctatattttctgactttttcctgctcagctacgcaaataaaaaataaactgaataacctaatataaatatagctaaatattataacttcaccaaatgataacatccatacagctaaaggtaatatttctgttttgtcagactaaataaatatagtaaagtgaaattttaatgagtgggggtttaattcatcccccacctaacttctttgctttcgctgaattttgagatgggagtcttactgctcggaaaatagcgggataaacgtttcctcgttacttcaatctatttagaaattccatttatttttctatcaaattataaaccttatcatcttcaaaaggtgttacaggtaatacccaaatactacacttcatcatttgaccactttatattccaaatctatttccttttatagtacaagcatacacgccaattgtgattcatcttcataaactactatgtggtttaaatttattaagaataggaggtaatattttgggttcatactatcattcttcaaactcgtataaaaaatgctcatgcaaatcttcttccagttcaaataaaaaatgttcatgtgaccattcacataaacgaagctgtcctgcatacggaactttttggcaaactgaatttataactgttccttttggcgatccttttccatttaatcacgttggacctttagcaggaggtgtttccttactaaatcctactactatacactttagacaagctggtgattatagagtttcgttcatttccagtattaatactactttaaatcctgtatttccacatatcccagtcataactatatttttaaataacaatccacttgctaatagtcaaggtgacttcgctattcaaatgaatacttcatcaaataacgaatgtcttcaactcgttggcgaaacaattgttacagtgcctgctaattcaactcttcaacttagaaataatagtggttttaatcgtcaaagtattgtaacttgtgacaatggtataaattcagttgaattaacagttacaaaactaagttaaaattatttcttcacattcagatgctatttcagcatctttttttattgaataacagttttttcaacttttattatctctccccacataaaaaagtgcagaattctttctaacacaagatttctgcactttttattatacttatttattcttccttatttctctacataaaccgacttaacaatcgtacgattatatggttttccttctttattcatcccttttatatccatcgtaacgttgtatactcccggttgttttatatctttcaaagcacctgtaaatgtattcgtattaacattttgtaattcattaaattcagagactaacttaccttctttattaacgactcttactgttatggaaagatcccctttcatttcaggtgctacaggtgattttttcagtttatactcaggtttatttattttaacttttgtaggcattcgaagaacaaatggtgcgtcatccttgtaatcgcttacaactaaatatgcatctttcgactgcttcgccatcattttgattttccattcgcctacttccaatttatcaaacttaaatgttctaattgtcgccctattaaagaaagattcgccttcaccagtagttatagcgctatctttatttgcatagatttttccttttggagataccatttgtacttctacatcagaagaagcagttagtacagaaacgattccttcagcctttttatcaacagaaatactttgctctatccactgattttgtggtaattcgcctcctaaaatattttgatttgaagttgtatttaattgttctagatcttcatttgaactagtgctggatgctactaaagctggtaatcccacatttgtcgtacgtaaatatggttcaattcgtgcaaaaacagctgatccttttcttatattgtcatgatcaaatctggaatctgtaaataaatgtgtaccgtacgatagcttcgcactccattcatttactagtccatcatttgaaccgtacgatgataaatataacccgcccatagataatgcagaaaatgttggcccccagctagttccagtagccgtatagtaacggtttaatttagctgctgggttgttatctattattgaacgaaactttgccatttcacctatttgtaacgaatacgtaccatcatctttttgacctaatatagaagcaagccaacctgcccaccaactatatgacaaatctgctaaatttgagccgtgatgcggtgtagcaagtgtaataacatttccaacaaatcgattcgcaccatattcaactaatgcggcttgtgtatcaataccacctttactatgcgctacaatattaacttttttaccgaaataattatatatttcttcaagtttttgtgctaacaattttccgttatcccactgactagccgaacctttccctgcagcatcatacaattgtataaacactgtttgataacctgcttttaaagcataatcatacatatcatttatatcatgatatactgtctttccataccaactatcagcattaccatttcttccttgtacaaagagaattggcggtttattctcatcataattagcaggtttttggcctaaaaaccattctccaggtgtgaatacttctgtatcaggaaacccctttccaagctcttttacaacttctgcctgtacatttgtgctaatcgttggagccatgataaaaaatacaattagtaaggccacacatcttctcatcagtcgcatattactccccctatttttttgaaagaaggtgttctttataatattttatattttcccttccttaataatagctaatcttttatttttagaaggttactagttgtataccctcttccttaactctcgttattctctttgtttctacctcttccttttgatagaatacgacaaaaaagtttctcaataattgttaacttcgctacacccagatattttttaaatcattattgtttatataaagcatacaaatcttgaaaaaattttagtgaaaaaacattttattactagttagttatttaaaaatataataaagatatgtactttcttttcattaaatacaaactaattttaaaggagcttgtattataagactttcctacgattaaaaattaaactgaaatttccgaatagaaaatcatatttccagaaacatatattatgataatttccgcacacttgaattaactttttagaagtactaacctatcggtgagcagaagaaaattctgtaaaaagaaaggagaatactttatgatgaccaaattacaaaaggagttttttaaacgcttagaaattcctgcaaaagaaataacacttgatgatttagatgaaattctcttaaaaatgggaatgatcctcccctatgaaaatcttgatattatggctggtactattaaaaatatctcaaaagataacttaatagaaaagttacttattcaaaaacgaggtggactttgttatgaattaaactccctattgtattattttttaattgattgtgggtttcaagtatacaaagtagccggtactgtttatgacctttacgataataaatggaaacccgatgatggtcatgtcattatcatattaagtcatgaggataaagattatgttgtggatgcaggttatgcatctcatctccctttacatccagtcccttttaacggagaagtcatctcctctcaaacaggagaatatcgaattcgtaagcgaaatactcgaaaaggtacgcatattttagaaatgagaaaaggagctaacggggaatctacaagtttcttacaatctgaaccttcaaacgaatggaaaataggctatgctttcactgtagatccaatagatgagaaaaaagtgaataagattcaaaaagtgattgtagagcataaagaatctccttttaataaaggagctatcacttgtaaattaactacttatggtcacatatcattaacaaataaaaattatacagaaacctttaaaggcaccaaaaataaacgaccaatagaatctaaagattatgctcgcattcttcgtgactcttttggaataacgcaagagaaatatgtaggaaaaacactagaaagaggctagttgactacaagtatttcataataaagcagattctatatttagaatctgctttattttatattttgttataaattaatttaattttgttgttaccctttaattttcaattatatactcatcatcatatttatcgtattgtagccctttccctatctttgactccgtaacttgatctcttaaaaacggtgcagcatccattttactagttgcaatttcaattccatattttttcgttaaatgagctaactctattaaaaaccactctcttcgcaatgtaactggaatatccaatgtttttcttttcatatataatagcacctcttttattttcatagcttaaaaatatcactggatgcacttattaaaactacctttcaccgctaacatccaatgaaacattatagtatatgcatgtccatttcaaacgtgctatcacaaatatgacatttaagtttacataattatattatgtaatagtaggaaaggaaggcatgtcccttcctcttctactatagatttaaattaagaacatcttggtacacctaaagctaaaaataaacctgctactcccgcagtaatcggtacttttaacgtaataacatcatctaccttcgttactaaaaagtaagcattaccttcttgtaatatacaagttaccaacaattgaaattccattcaaatctcctcctttcaattgatatactataatttatgaaatctctttcaaaaagtaataggaaatatatccatttttccttatatataaaataaatgtttatgagtctattaaaaatattaattttctaaatttatacaaaacgtgtaatatccaataaattcctatataatcaataagaagaatcttacaaatagaggtatgaaaatgtcgattttaagtaatattggtgcagctttattttttattgcttttattcttttaatcttatgtatcatttcattctttaagaaaaatggaaaagcaaaacaatatggacgtcctaccgttattctttttatgatttctattatattaataacggccggtacaacaaaatcggaacaccccgtcgtcgagtttttttctactttaagtttcattctatttatattcttccttgttctagcaatcttatctgttattaagaaaacaggtgtagcgaaaaaacaatttattattacagctgtattatttgtcatttttgttgtgttattaggtatttcagctccttcttctgaaaaaacgacagcaactagtacaaaagttgcctctaataatgaagagccaaaagatagcgaacagaaaaaagagctagaaaagaaagaggcggacgaaaaaactcaaaagcaagaagatgagaagcgtctagccgaagaacaagctcgtaagcaagaggatgaaaaacgtcaggctgatgaacaagctcgtaaacaacaagaagaacaaaaacgtcaggctgatgaacaagctcgtaaacaacaagaagaacaaaaacgtcaggctgatgaacaagctcgtaaacaacaagaagaacaaaaacgtcaggctgatgaacaagctcgtaaacaacaagaagaacaaaaacgtcaggctgatgaacaagctcgtaaacaacaagaagaacaaaaacgtcaggctgatgaacaagctcgtaaacaacaagaagaacaaaaagcacagcaagctcaaacacaaccagctaatggtaatactgatagtgcatactacaaaaattgtgctgcagttagagcagctgggaaagctcctttacataaagggcaaccaggttatagctctcatcttgatcgtgatggcgatggaattgcatgtgaaaaatagtaataaaaaagaagcttttactaagcttcttttttattaacgtaaaatattaccacttattactttcccccttattttaataacattcttcttattattctcaaaaacgacacagaataagtgatttcaatcactacatagattttaatttatcgctattcttaattcagatattacattaaaattttatggaggcattcatatggaacatacatttactgaaacttcaattgttggtgagattgttacacaatttccgaaagctagtgatctttttaaatcatatagaatagatttttgttgtggcggtaataagccacttattgatgcaattcatgaaagaaatttatcagctactgaagtgcttacagagttaaatacgctttatcataatacgaaacgattaaatgaatcggaaattgattggaaaaatgcttcttatcgtgaattgattgattatgtcataaataagcatcaccgctatttaaatgaagaattaccacagttaagtccatatgtgacaaaagtattacgtgttcatggggcaagtcagcctcattttgctcaaattcatgagctatttcatgaacttagaatggaattagaacagcatttaattaaagaagaaatggaagattttccattaattttagaatttgaacaaaatccaactaatgaaaactatgctaagttacgtaaagtagtaaatgaactagaaaatgagcacaatcatgctggaaatattataaaagaacttcgtaaagtgacaaatgactttactcctccagaaggtgcttgcggtacttatcgacttgtttaccaacgcctcgaagcgctagagtctgatttatttgagcatattcatttagaaaataatattttatttccgcgtgccattacgaaagcataaatcaagtgcaggacatgagtgtaaatacttatgtcctgctttttcgtttcgcgaaaaatattcacatccccttcacataaaaccgaattttaacaatttgtgaatcattataaagatgtgataaatatcacatctcccccttatttgattttctataataaaaatataatcctttgttcaatatttcacataaaaaggggaaacgaaaatgaaaaaacgtttagttatgatcggaaatggtatggctggcattcgctgtatggaagaaatcttaaaacatgatagtgattcatatgagattactatttttggagatgaaccgcatccaaactacaaccgcattatgctctctcatgttttacaaggcaaaacaaatatacaagatatcattatgaatgaatacagttggtatgaagaaaacgaaataactttgtatacgaatgaaagagttcaaagtattaaccgagaagaaaaaattattattacagaaaagaagcatactcttacatacgacaagctcattatcgcaacaggttctagtgcttttattttacctgttgaaggttccgcactttctggtgtaacagggtttcgaactattgaagatacacaatttatgatagataccgctaaagaaaagaaaaaggccgttgtcattggtggcgggttactcggtttagaagccgcaagaggtctaattgatttaggaatggacgtacatgttgttcatttaatgcctagcttaatggagcaacaactagatacgaaagcagctgctcttctgcgtgaagatttagaagcacaaggcatgaagtttttaatggaaaagaaaactgtaaaaattcttggtacagaccatgttgagggcattcaatttgaagacggtgaagttgtagattgtgatttaatcgtaatggctgtcggaatacggccaaatacgcaaatagcaaaagatgctggtctaattgtaaatcgcggtattgtagtcaatgactatatgctaacaaatgatgagtccatttatgcagttggagaatgtgcagagcatgacggtatcgcatatggacttgttgctcctctttatgaacaaggtgcgatattagcaaaacatataacaaatttacaaactgatggatattcgggcagtatcgtcggtacacacttaaaagttgctggttgtgatttattctctgctggccaaatttatgaagatgatcaaacgaaagcaatatccatctttaatgaatgtaaacgttcctataaaaaaatattaattcgtgataataaagtcgtcggtatcgttttatacggtgatacagctgacggtacccgcctctttagcatgttaaagaaagaagaagatatacaagaatatacaccagcttccattcttcacaaagctggtgaagaatgtgaacttgacgttgctactatgagtgcggatgacacaatttgcggatgtaatggtgttacgaaaggcacaatcgttcacgccattttagaacaggagttaaagacttttgaagaagttaaagcctgtacgaaagccgcagggtcttgtggtaaatgtcgtccgcttgtagaacaagttttatctcatacacttggagatgcttttgatgcttctgcacagtctaccggtatgtgcggatgtacacctttatcacgtgatgaagtcgtagcggccattcatgagaaaggtttaaaatctccaaaagaagtacgaaacgttcttggttttgtacatgaagatggatgttcgaaatgtcgtcctgctttaaactactatttacgtatggcgattccagaagaatatgaagatgataaatcatcccgtttcgtgaatgaaagaatgaatggtaacatccagcacgatggtaccttctctgttattccacgtatgtacggaggcgttacaacagcagatgatttaatgaaaattgctgaagttgcgaaaaagtacgatgttccacttgtgaaaattacaggtgcgagccgaattggcttatacggtgttaagaaacaagatttacctaacgtatgggctgaattaaatatggcttctggatatgcgtattcaaaatctcttcgtaatgtaaaatcatgtgttggctctcgtttctgccgtttcggtacgaaagattcattaggacttggtatgttgcttgaacaatcattagaaatggtagatacacctcataaaataaagatgggtgtaacgggctgtccgcgtaactgtgcggaagtactgacgaaagattttggcgttgtttgtgtcgaaaatggataccaactttatattggcggaaatggtggtacggaagtacgcgaagctgattttgtaatgattgtccctactgaagatgatgtccttcgcatcgctacagcttacatgcaatattatcgtgaaactggtatttatggagagcgtactgcctactggacagaacgattaggcttcgatcacataaaggaaatactgcaagatgcaaatatggtcactaagttaaatgaacgtttccaaaaagctcgtggcacatataaagaagcatggggacaagcactagaaacgaaatcattaaaagcgatgtatgaagtagaaactgtgaaataaggagctgtgatctatatgatacaaacgaaagaaaaaataaaagttatgcgtgcagaagaccttcctattcaaatcggtaaagaggtacaaatgaaaggtatgtctatcgccctattccgcctttcaaatggcgatattcgagctgtagaaaatcgttgttctcataaaaacgggccattagcggaaggtattgtatctggagaattcgtcttttgtccactacataattggaaaatttcactactaacaggtgaagttcaaaaacctgatgatggttgtattcaaacgtatgaagtagaagttattgacggggatatttatatatacatgtaatttacaaaaggaagcctcccctggcttccttttaaataaaaatagacgaggtgcgaatatgaacggatatgtatatttagttggtgcaggaccaggtgatgaagggcttattacaaaaaaagcgatggagtgcttaaatcgtgcagatatcgtcttatatgaccgcttattaaacccttcctttcttaattatacaaaagaaacatgtgaacttatttattgcggaaaaatgccaaagaatcatactatgcgtcaagaaatgattaacgcacacctccttcaatttgcgaaagaaggaaaaatcgtagtccgcttaaaaggcggagatccatctatttttggccgtgttggtgaagaagcagaaactttagcatcagcaaatattccatatgaaattgtaccaggtattacatctagcatcgccgctagtatctatgcaggtattcccctcacccaccgtgactacagtaatagcgtcactttattaaccggacatgcaaaaggtcctttaaccgaccatggaaaatataattcatctcacaatagcgacacaattgcctactacatgggtatagaaaacttacctacaatttgtgaaaacttactacaagcagaaaaaaaagaagatacgccagtagcagtcattgaatggggtacaactggtaaacagcgcgttgtcacagggacactgtctaccattgtttctattgtcaaaaacgaaaatatttctaatccttctatgacaattattggtgatgtcgtttccttacgggatcagatcgcttggaaagaacgtaaaccattacacgagaaaaaagttttatttgcatctgcaacgaataaaacaagttcaatgaagcaaaagttacaagaagccggtgcagaaatatatcaaattcctactttcaaaaaggtagaatacacattaacacttgaacaaatcaatgaaatttttaacgttaatcgtcttgttttttgttcagctgaaagtgtagaaatattgatgcaatcatgtagtaaacaccaaaaagatattcgttctttacaagcgcaactacaacatatgaacgttgccactcaagaaaaacttatgcaatatgggctactaagtaaacaagcagagttctcttccaatacaacagtttatttaggacgaaacattaaccgaattgctgttattcaagaaaaaattggtgctggttcctatatgatgactcatgagtacacaattgatcatcgcttcgatgaaattcattcacgtatgctttctgaattctcatgggatagcattgtatttgaaggtcgtgcttctattgatacgtttctagcagaaataaaacgccttggctttatcaatattcttactctcccattctcgtataccgacgttccaactttatactatgcaaataaagttgggtttcataacgtagatcatcaattacaagaaactcttatgaagaaagacatggtgagacaatgaaaggaattgtatatgttggacatgggagccggctacaagaaggtaatgaacaattcattcaatttattcaatctgttatgaaagagcgaaacgaaagaattcaaaaaatagcttttctagaactaacgacacctactatttcggatgcagttacagaaacgataatagagggagtaactgaaataatgattgtacctgttttattatttgcagcagctcactacaaacgtgatgttccttttgaaatagaacaactacaaaagaaatatccacaaataacattttcagttgtacctccttttagtacacatccacatatggtggaacttgtagtgaaaagaatacgtgaagctatgccaatgcaaaatagtagtattttactcgtaggacgaggcagtagtgatacacaaccgatacatgagttacaacaaatcggagcagccatcgaacgaaaacttggtatgccagtatcctgttcctttttaacgaaaggaactccctcttttgctgttgagctcaaggatataacatcgactgcgtcccatgtatatgtcatgccataccttctctttaccggattattacttcaaaaaattgaattgcatacaaaaaaatacaatcatgttacgacttgtaactgtcttcagtttgatacatatatgaaactaacattgttagaacgaatggaggaatgcatatatgtataacatgtaccctcttatgtttaatctacaaaataaagtggttgttatcattggtggaggtaaaattgcatatcgaaaagcgtctggattaaaagatacaggcgctttcgtcactgttgtcagcccagaaatttgcgaggaaatgaaggaactttcttatattacttggaagcaaaaagcttttagtaatgatgatattaaagatgctcaccttatttatgcagctacaaatcaacacgctgtaaatatgatggtcaaacaggccgctcatgatttccagtgggttaacgttgtaagtgatggtacagaatcatcttttcacacacctggcgttataagaaataatgaatatgttgtcactatttcaacttctggtaaagatccatcatttacgaagcgtttgaagcaagaactaacatctatattgcctaaacttataaaaaagatttctcgtacacataaattgtaatctatttcttagttaaaatagtaattacctttggacaaacgttttttaggggacgtttgttctttttgttgtagttccgttcttttatttcacaagcaatctatgaagaaaataaatggtgtttgcaacttgtaaacaaataaatttcatgacaagtgtaacattacgagcaactctttctattcagtttttatattggatattcattcaaccaaattagcgcttgttcataatcatcaaaaaactccacggattcttttgtattggattgttgcaaatacttcagtatctctccttcttcaagaagaaatgcaattgccttactatgattcaaaatggtttcattgaagaacttatctttccatactttttgaacagaaaaatgatttggggtatacccttttctatccaccaacaatttgtatttccgaccctcagaaataaattgctgacaaacctgctcaaaatcattaaaccattcatacacatcctctgtattaatctggccaattagatgggtaacaatcaaatctcctgaaactattgtgctgatattctgtttactcaacttttaatcatctcccttagtggcaattatgcataaaattcttacttgacactcccaccccatcgctatcaccctaagctcatataactttaattataagcgagattgtgtcttttttcgcaagtctatatgtaaatactttaaagatttccttaactaatctgccctttaattgaataacttttgacatcttcattttaaaagcacattcttatagaaaataagcgtttattgagagatcaataaaaacatgttgaagcctattactaaaagaaccatcccaaaatactttgggatggttctttttccttattaatgattctttaacatcactaacagcttttcttgactatacatccacactgtaatgattaaacaagcaagtgcgacttctgataatgccataaatccaattgcataatggcctgttagttggaatagtaatgttaaaattaggggcgggaagaaccctcctagtccacctaaagctgaaacgagtccatttacaatacctgcttgttctgagaagtacattggaacgagtttaaagattgtaccattaccaatgcctgcacaaaatgcgactagtaagcaaccaaatgtatacacgttcatactaggcatgaatgataaaataatacctgaaagtgttaaaccgataaatacgaagattaatattttaaatggattaaacttatcgccgagccaaccaccaatcggacgcataattgttgcgagtacgatgaatcctgcagttcgcataccagcatctactttctctaatccgaagtgagatactaaaaagtttggtaagtatactgtaaatgcgacaaatgatccgaatgttaaaaagtaaaagatacataaaaaccaaagtttctcatttttatatacaccttttatttgttccattaatggtgtattcacctttttctccttacgatcacctaataaaaagttcataagtgcaaatgctgcaagtaaaactaaataacattgtactgtcgttctccagccaactgaagttgcgataacaggcgctaaaaatgaagtaattgctgttccggcgttaccgacaccgtaaataccatttacaaaaccatgactctctttcggaaagtattttggtaaagaagttactcctacagagaatacagcaccaccgattcctacaaataatccaccaataattaaatccatcatagaattggcaacactaatataaaagacaggaagtaataatagaataaaactaataaagaataattttcttgctccgaaacgatttgtccaataaccaattggaatgcgaagaacagaacctaaaataacgggtactgctgtgaccatagaaatttgccccgcagttaatgggatatccactttaatataaggcattaatgatgataaaatgacccataccataaaacctataattagattagaagtttgtaaacttaattgaaaattaggacttttcatcctgttccctcctatgtatgcatagttatattcattctctccagcctaatcacgtcgtaacatgattaggtcgaaaagaatcaaccaccacttactggcggaatcatcgccacagtatcaccagtttgaatgacgtcattctcatttgcatactcttcatttatagctaccatgatttcatttgaaatcgctacgttgtatttcttaatgagtaccttctttagttcagcaactgtaatattttcacaatcgatttgtaatgctggcttacttacttcttcttgtaaatgtgcaaataatagtacttcaatcatattctcatctcctcttcaggttcaccatcttcccaaaattctttcttccaaattggaacgatttgttttatacgctccataatatattcgttcgcctcatatgcagctttccggtgtggtgtagaaacagcgacgacaacagcaagatcagaaatttgtaatgtaccaatgcgatgtgtaatggcgacaaatgtcccaggccacctctctcctaattcagtaccaattctctcaagttgtttttctgccattgttttatatgctacatactctaaatgtagcgtacgacgccctttcgtaaattctctaacagtaccaacgaaagtagtaactgcgccacactcacgacgaattactttgtttgtaacttcctcaattgaaataggtgtatcaattacttcataatacgtttgtatcattttgcacctcttatctttgtataagttagtaatctatttttctattatttgtatgatcgaagtggttcttcccacggccactcacttccagcgtttgattctaataacagtacggaaacagttattcctgcttcaaatcctctcgttcctcctggcaggacgataaatgcgttcgcctctgcaagtgaagaaattgcactagatttatctaaaccaactggtatagcttgcaattgactatctacaaattccactctccctcttacaaaacgagtaaacggatttgctttcgaaaagtctttttgtaaaattgcttctgcacgataaatgtgtggatctttcctatgcaaatatgttccaatgactggtcgaacatataactcacatccgacataacaagcagaaggattaccagataaaccaaatagtagttttccttctacctcagctacagttgtcacacttcctggtcgcatcgctattttgttaaaaagtacattagcttgtaacctcttatgaatagcaggtaaatagtcataatctcctaccgaaacgccaccagttgtaattaaaatatcgacttctttcatcgctttttttacagtgttataacacgtctctaaatcgtcagcgaattgcccataatactgtacaactccgccggctcgttcaatttgagcagcaatcatataagagttactatttcgaatcttccctagctttaattgttcatgtacttcaagcagttcgcttcctgttgttacaattccaataaccggctgttttataacatgtacggaactataaccaaacgtagcaagaagcgctgctactccaggattaataacagtcccttttttcacaaggatgctattttggtttacatcttctcctttaaaagaaatgttatcgctagaagagaaagagcgttttaataccatataaatcttttcattttcttcaaatccttccgttagctctaacataacaaccacattacacccttccggaattgcggcacctgtcataatacggacagcttgaaattctttcacttcttctgtaaaaacaaagcctgctccaatttcgccaattacttcaaattgaatggggttactactactcgcttcttttgtatcttccgctcgaatcgcaaacccgtcgtacggagagcgatcaaaatgcggaacatcatgatctgcaataacatcttctccaagtgttctaccgtagctttctataagagaaaccttttccatttcaccttggtaggcatatttcattacacgagcaactgcttctgctactggaattggtatacgtttatctaacattctttttcacctcattttaataaggaaaaaacgatttttctgttcatcctatatatttggcgtataatcgttttgctattttcacatcatttgtcccatgaataaatgccctaccgtctataaataaaacaaaacgatattcatcaactagaaatgatagtaagtaaggcgtttttttgacatgtacacttttttgtaatcgtttttgaatttcggttaaattaagatttctctttattcctgaacggatttgaactgtattccgtccgcataacacttccgttttcatttgcgcttcaaatattaagcttggatacgttcgtgatttcccacaagaaggacatgtacttttcttctgtctatttacttttaatgagagatattgattgttccaaatatcaaatgacaacatcgtccctcttaatgattcataatcacccaccaatattttcatcgcctctgtaacttggtgagcaacgaccatttgtacagctggctgaatgattccggctgtatcgcatgttgcaccgcccataggatgatccattagacagcgaaaacatggtgttttcccaggaagaattgtatacgttacaccgtaactcccaatacatccgccatatatccaaggtatattttctttttgtgaaatgtcatttataagtagacgcgtatcgaaattgtcagtcgcatctaatatgagatccacatcttttgttaactcttctatttctcgcattgtgacatctgttacaactggtacaatttccacttcagaattaatctttcttacatgttctgctgctgcaattgcttttggtttacactgctgcgcatcttcttctgtatataactgctgccgctgtaaattactccattcgacgtagtcacgatcagcaattgtcaatttcccaattcccatcctagcaagtgcttctgcattcgcagctcctagcgcacccgcaccgattaggagcacatgcttttctcttatttttctttgtcccatttcaccaattccagaaaacaacacttgtcttgaataacgctcttgcataagaaatcctcctttcactatccaccaatgtaagacatttcaacttttggacgtttacttgtattctcaactgttctttcatctgaatatcgatctgttctatatcgccatgtatcatttaaaatttttaatagtgatgcatcagaaatattttctcgaagaagcgttcgcaaatccgttcctttcgctccaaataggcatgtgaaaaacttgccgtctgccgaaatacgagctctcgtacaagaaaaacaaaatgactcagaaacagaagtaataaatccaacttctgcattactccctacatatcgatacaatttcgcaacctctccaaaataacgaggctgagcgggctcaattggatatacacgattaattttctctattaattgttccttcgtaatgacttcttcaaaattccatccgtttgtactgcctacatccataaactcaatgaaacggagctgaatttctttttctttaaaataacgagccatatgaagaatttgactatcattcatccctttttttacgaccatatttacctttacttctaatccagcagcatttgctgcttctattcctttcagtacaggttttgtacttacatttcttccgttaatttttttgaagacatggtcctctatcgcatctaaactaatatttacacgttttaatcccgcgtcttttagcgccttagcttgttttgctaaatgaattccgtttgttgtgagtccaatatcttttaagccttctagatttgtaagtcttgcaattaacttcggtaagtctttacgcaataaaggttcaccgccagtaagcctaattttattaactcccatacttataaataatctcgctaacctttctatttcattaaatgttaataaacactcttcctgtaaaaaagcataatcaggtccgaacacttcagcaggcatacaatatgtgcacctaaaattacaacgatcaataactgaaatgcgtaaatcttgaagtggccgctttaaagaatctttcatattctcgtgcatctctatcccttcttttctgctgcaatccttagtaagctttcatttttttatttgccttcattataaaaaagaagctacatattcaatgtgacttttctcacatcactttccccattcaaaaaattttcacaaatccgttcgcattttgttcacatctttagccactcctccttacggtcattgaaatttcaatttatttttaaatagctcttgcattttcatcatacttacactcaaaataggaaatgtattgcttataagaagaaaggtgatcactgtggcaaacagtatgacattatctcaagatttaaaagaattacttgcatctgttgaatataaaatgcagataaaaaaaggtagttttatttttcaagaaggtatggaggcaacagaactctatatcattcactcagggaaagtacaaattagtaaacttagtgctgacggacaagaattaacacttcgaatttgttcggaatatgacattattggagaattaacattgttcacggataatgcaaaatatttattaaactcaaaatgtcttgaagatgttgaagtaggtgtaataaaacgtgaagcgttagaaaaagcattactccaaaaacccgctcttgtatttgaatttatgaaatggattagtgaacatttaagaagaatgcaaacgaagttccgagatttagtattacacggcaaaaaaggtgccctgtactctactcttatacgaatgacaaatagttacggtgtattaaaagaaaatggtattctcatcgatttaccattaacgaatcaagaactcgctaatttctgtgcaacttcacgtgaaagtgtaaatcgaatgttaaatgaattaaaaaagcaaggtacaatttcaattcataaaggaaagattacaatccacgatttacaatttttaaaatgtgaaattgcttgtgaagattgctctgcttctgtttgtagcattgattagcatcttatttagatgctaatcttttttcaatttaaactacttattaacgtttattgcctatgtaaacaaaaacgaggccttccatattagacctcgtttcgttttaaccattagctcctatccgtttacagcagtattattttttcaactcattaggaatacgtcttctgtaaatcacataactacggcttacatatttaattggggcactaaatacatgtacaagtcttgtaaatggccacactgcgaaaagccccatccctgcgagaatgtgaattttaaaccatattggtacttccatcatatattcaactttcggttggaaaataaagagacttcggaaccaagggccaatcgttgtacgataatcaaatccttttgaatcgatatttaaaaatgttgaagaaagtcctgctagcattacgataagtaataaaataagcgcaatataatctccctttgtactcgttgcaatgatacgttttacagttacgcggcggtacgttaatataattaaaccgataatagaagcaacacctgccggaagcccgaaactaattgctactacatggtacacatgctcagaaatacctactgaacggtatacagcttctggaattaaaatccccataacatgaccgccaattacgaacatgatcccaaagtgaaataatagacttccgagtcggagcattttcttttctaatagttcactagattttgatgtccatccaaattgatcatagttgtatctaaaaatatgtccaccgataaagattgcaaaaatgatatagggaaacaatacccaaagaaattgatccatcattttgacaacgctcctttctaatttgtctgtacaccccatgtttcgatagcgagtagcacagacgcaagaattggttcatacatactacccgcttcttttaattgaacgtgtaatgcttgtatattttccgtgtatttactcataattggttcactgtcttgctcatttgcatttgcaaaaaactcaagtaaaagtggtaaatagtcaggtagttctttatctgttacgctaaaacctgattttttataatgttgttttaactctagtaattcaatacctctttctctttgttcaccagtgttcatataagtaagatacatatttgttttcttaccaaaatcaaatgtatatacgtaactatcaatgagttgatcattcgttttatctagcacttgctttataaaggctgtaagtgaagctttaacgtcttcctgttctattgttttaacctcttcttgcaattcagttaaagcttctctccaccctagttcaggataggagagaagaaaagaagaacaagaaaaagctgtttgtaaactttgtctcataattttctgccccctttatttaagaaattgtcatacaagagcctggaccacctgtgaatgataaaccacagcttccttgttcgctatataaatctgccacttgttcacggtgagatgtcgggataacgaagcgatctttatatttcgcgatggcaagaagacgatacatatcttctacatcctgtttcgttaaaccaagttcttttaatacagcttcatttggctctttattaatttgcagtgctctcatatgtgttcgcataacagccatttttttcaatgtaagacgaatgtgtgattcatcccctgcagtgagtaaattcgctaaatattgaattggaatacgcatattatcaattgcagggaaaacctcttctgcttgccagttactacctttcccttccaccatgttcataattgggctaagcggagggatataccaaaccatcggcattgtacgatactccgggtgaagaggcagagcaattttccaatcgataatcattttatagataggtgactgttgtgctgctttaatccattcttcaggaatgccttgttttttcgcttcagctgctatttctggatcatttggatctaggaaaacagtaagctgagattcatataaatctttttcgtcttcaacagaagctgcttcttttactttgtcagcgtcatatagcattactccaatatatctgatacgtcctacacatgtttctgaacaaattgttggcataccagcttcaatacgtgggaagcacattgtacatttttcagctttattcgtttgccagttaaaatacacttttttatatggacaagatgatacgcagaatctccatgcgcgacatgcattttgatctacaagaacaattccatcttcttcacgcttatacatcgcaccagatggacaagatgatacgcaagatggattcatacaatgttcacatatgcgtggtaaatacatcataaagacgttttcaaaatctgttttaatttcttcttccattttctttacgtttggatcttgcaatccagttatatgtccgcctgctaagtcatcttcccagtttggaccccattcaattttgtcgataaattcgcctgtaattgctgatttcggacgagcaactggctgatgcttacgctgcggactatttgttaacgtttcataatcatagttccaaggttcaaagtaatcatcaatcgttggttgatctggattgtagaaaatattcataagacgtttcattttcgaaccggattttagctgaatttcaccatttttcaattcccagccgcctttatatttctcctgatcttcccattgtttcggataaccaatacctggtttcgtttctacgttattgaaatacatatattcagcacctggacgatttgtccaggtgtttttgcatgttacgctacaagtatgacagccgatgcatttatctaggttcattaccattccgacttgtgctttaatcttcaagccaatctacctccttcagtttgcgaattacaacgtttaagtcgcgctggttcccagttggaccataatagttaaatccataacttaattgaccatatccaccaatcatatgtgtcggttttacgtgaattcgagttggactattatgcgttcccccgcgattacttgttaatttcgtaccaggtacgttaatgtgacgatcttgcgcatgatgcataaatgccattcctctcggtatacggtgcgttacaacagcacgcgctacaacaacaccgttacgattaaagcactcaatccaatcattatctgcaacacccgcttcagcagcgtcctctttattcatccaaacagttggaccacctctaaatagcgttaacatcggtaatgaatcgaagtacatactatgaatcgaccacttattatgcggtgttaaatagtttaatgtaatttctttcccttctacttcaggtcgtgatttacggaacggtttatgttgcagaattggtttaaatgttgccatcgtttcaccaaattctttcatcatgtcatggtctaagtagaaagattgtcgaccagttatcgttctccaaggaatgagacgttccacatttgttgtaaacggtgagtaacgtcgtccacctttttctgaacctgtaaaggccggagaagtaattactgttttcggttgtgctgtaatttgttcgaatgtaaagcattcttcttcacgttcttctgctaaatcacgtagttttaaatctgtttgtttttcaagtgcttcccatgcttttactgccatatgaccgtttgttgtagaagatagtgttaataccgcttcagcagcattgattgcttctttgatgtctggacaacctttcgcgatagaatccgttcgaacgactcctaatttgctctttaattgctcatactctttttctgctgaccaagagatccctttcgtaccaatcggttgttttccggcatttggtccaagcgcagtcattttgtcataaatcgttttataatccctttcaacaacgtgaatttgtggcatcgtcttacccgggattggttcacattcacctttactccaatctttaatcttgccaagtggttgcgctaattcttgcggtgtatcatgaagaagtggtgttgcaacaacttctttcattggttcaagatcaattttcttcgctaaatctgacacagctttagaaagtgaagtgaaaatatcccagtcagagcgcgcttcccacggtgaaccgattgccggattaaatggatgtacaaatggatgcatatctgtactgcttaaatcgtgtttttcgtaccaagttgaagcaggtaagacgatatcagaatacagtgctgttccagccatacggaaatctaaattaatgagtaaatcaagctttccttctggcgcttcttcatgccactttatttcttctggtcgtaatgaatcactgtcgtcattcattaacccgtttgttgtacctaataaatgttttaagaaatattcatgtcctttaccagaactcgaaattaaattcgcacgccatacgaataagtttcgcgggaagttgtttgtgttatctggatcttcaatcgcaaacttcagttctttttcttttaatttttgtgcaacatattttccgatttcttcttgcgttgttgcaccagcagcaacagcctctttatataattcaattccatttttctcgaatgttggataagaaggtaaccagccaagtcgtgcagctaatacgttgtaatcaccgtgatgttgataacgagagttaccttcaactggtgacgctaaatgtccaacaggtgtatcttcataacgccattgatctgttacgaaatagaagaaggatgtaccgttttgtaatttcggtggaccttgccaatcttttgccatcgcgattgtttgccatccttctgctggtcttaatttttcttgaccaacataatgagcccaaccaccgccgtttacaccttgtgctccaacgagaagaacaagatttaaaacggcgcgataaatcgtatcagagttaaaccaatggttaatacccgctccgacaattatcattgagcgaccattcgtatcaacagcattttgtgcgaactcacgagcaatttgaataataagctcacgttttactcctgtcattttctcttgccatgcaggtgtaaacggtatatcatcattgaagtctttcggttcttgtccgccaagccctcggttcacaccgtaatttgctaacgttaagtcgtatacagttgtaacgaacatttcgccctcttctgtcataacctttttcactggaatcgtacgttctaatactttgtttccatcatcagagaagtacggaatttgtacagttccaatcgcttcttccattccaagtaaagaaagacgtggatcaatcttttcacctgtttcttcatcttctaaacgcaagttccatttcttttcattatcccaacgtgaccccattgtgccgtgaggtgttgcaaaatcattcgtattctcgttccaaagaacaggtttccattcccctaacttcgtttctcgtccaatatcagaagcatttaagaaccgatcagcaacgaattgatctcctttttgtttcaatgtgacaaagaaaggaaaatcagtatattgcttcgcatactttgtgaaatattccacttgattatctacgtaaaattcttgtaagattacgtgccccattgccatcgcaagtgcaccgtctgtaccttgtttcacactaatccaatcatccgcaaactttgttgattcagcgaaatcaggactgacagaaacaactttcgttcctttatatcgaacctctgctaaaaagtgtgcatctggtgttctcgtcattggtacatttgaaccccatgtcataatgtaaccagagttataccagtcactactttctggtacatctgtttgatcaccccaaatttgaggagaagctggtggtaaatccgcataccaatcatagaagctaagcatcggtccacccataagttgcataaagcgactaccagcagcatgacttagcatcgacatagctggaattggtgaaaagccaacatttcggtctggaccgtatttcattactgtgtacagtaatgaagctgaaacgagttgtaatacttcatcccaattcgcacgaatgaatccccctttaccacgcgcctgcttatacgtacgtgccttttcacggttttccacaatgcttttccaagcctctaatggtgactcgttattttgcaattcttcttgccacatattccaaagaacaccacgtacatacgggtatttcacacgaagtggactataaatgtaccaagaaaaacttgctccacgtgggcatcctcgcggttcaaaatctggcatatcaggacctgtagtcggatagttaagctcctgcccttcccaagttacaattccatctttcacatatatattccagctacatgaaccagtacagttcacgccgtgtgtagaacgaattactttatcatgctgccaacgctttctgtacacattttcccattcgcgatcttcatatgtttcttgtgtatgattatcgttataacgatctattggtgaaaaatattttaaacgtctcattagtgctgaagtttttttcttcatactgttcactcctcgtatagtatgtttaaacttaatttttttactttcatgagagacctgtaaaaaaaacggtatgttaatcgcgttagcggtgattatcgtattagtaattggcccgttcgtatggaaagcaattcaaggtggctatgatacaatcctagctcgattcacaaaagcatcaagcaatgcagatgtagattcttggaacaaaaaataaatgtaaaaataaacgaggggctactctaaaagggggtcccttttttacacagcattttttatgaaattaagaggggagtaaagaaaatgggtctgtatattgtgggattattactaagttacatgttcctaaatgtatttactgatttgaaatatagaaaaacgaagaatatgtggcatctactatttttaatattggggataggaatcacgtaccttgccggaacaagaacagggaaagagattgcaattgtactagtcatggccttagtgtgtggtttattgctagagacatttaaattttcttcacccggtgataccaaaatgcttgtggtggtaggtttatatgttagcaatgtagtagaagaatcggctatgcttaccgcaattacattaacagcttttcatttactattcttttggattgctagtgtgtatcgattaattaaaattttagggtttgcgggagcgattaaagaccaattggagcatgctgcttctatatttggggcaaaactaccaaagaaagaaatacagctaatacagagctttccaggggcttgttctattttattaggagcaattatgtatgttgctttcactatttatcaaaacggaggtatgttagcttgaatagtagaatcattcatcaaagagaaacgtatatttatttcacgatattcgcactagtaggggtacttattgcaaatatgtttattaatatggtgtttatactagcgtatccgttacttatcggattaattgtacaggttgttctgcttcagaagataaaaaaacctttttatcggagcggaaaagaattaacggaacagttaaaactaaaaaatatatttctagtagaatcaaacattttaggagacgaagaaggaactgtctatgaggtgcatcaaatgcctttttcattttctaatggattaattaataaagataagagttataaagtcataaaacaagagtatgatagaaaagtcaaagaggatttaacgaaaattgcaaaatggcaagttacaacaaaagctagacttgttacgacaacacattttcgtttatatacaatttggcagaaaaatagtaccggttatcaattgaaaaaaatagaagagtgtattgacccatatgccaagatgaatcttatacaatggatgattgcttcattctgtacgactggacgtttaaagtatgataagaagcctaaagagtgggaaagttacgaatggatcgccttaaaataaaaaggcaaaagtattctgtaaaattaaggctaagtgaatgtgcttttttatatacagagtaattgtttgtctttaatgtcacacattgaatatatattaagtacatcacttttaggtatagtgatgtactttttgatttttaaaacctttaaatgaatccatttacaaccaacatagtaaaactcataagcaaaaaaagaatagcaaaaacaatacatttaaacgttcaatttcctacgaggatattgaatttcataaaataaaactaaaccgtaatcttgataacctgagaaggaaatatatgaaattaactaaagaagaacttgtcaaaagactaattcttgcagaagaatatattgcagaaaataacactaaatgggtttcgaattactttgaatcatttaagtaggtgatgtacataaaggcatcatctacttttattaggggtcctactacattgctatcaagctaagtttttaaggtaccccctaaaagataattttgtgcccaattaatccacttaatggatattacattgtttgagatgttgcataatccttataacaaggattcttttttattatatttaagcaaaagagaactcttaaattaaaattagaatattagaagaccttcgaaagagtgctttatctacttctgaataaaacactgatttgaattatatttctcaataaacaagatatataaatggcataaaataaactttatgagatatatttagaggtcaccacgctattttgaggatttttacgtttagacaaaagtggacctttatgatggatgttaagagctatattttccaaaaaactatatttatatgttgaaaggaggattagagctgaaaattataatctacgctactttaaaaaatgtttttagtaatgatttttattcatataactaggaggagtaatatgaaattaatatcaaaaatagtaatgaccgcgttaattgtattgagtacatttgcattcaacttaggtggagaattagataagagttttctttctatcccaaaagcatatggggatgtaatcaaggcacttccacaaaatgcgtcaaagatagagttagattatgctcctgtgtatgattacgacacagacgggtgctatgcgactgcagcaatttctccagatggcacgactaaccctggcctaagtttgggcggttccccggaaagtgtctgtagagatgttaaccgactggaaaattcaaacacttattctcgggccaaatcaaataatggttggactgccattatgtatgcgagttactttgaaaaagatcaatcaacttcgggccctgctgcgtctggacatcgacatgactgggaacacacaatagtttggattaaagatggtcaggttcaatatgtaacttattcagcacatggtaactggtacactaagcctcgctcagacgttaaattcagtggaagccacccgaaaattgtataccataaggacggcctctcgacacatgcttttcgcctggctaatagcaatgacgagccgccagaaaactataaacaccagtggctccatttaccaatggttggttggaatggctatccaagcctagctattcgagaaaaactaatgactacgaactttggatctgcaacacttgagatcaaagatggaagatttgaagaagcccttgatagcgcaaagccatccaatgccaatgactttaacccttacgcaccggaactggaagatggcggtgcttatcaaatagtttctactttaaataatagtagtgttgttgacttaaatcaagcagatggaaatgttctgttgtggcaaaatcgcaacgctaataatcaaaaatggaagctagtatatgattcaaataaaaatgcatatcaatttaaaagtgtaacaaatgaaaatttagtattagcttggaatgatcttaatggttccaataatgtagttgctacatctaatcaaaataaggaagagcaatattggataccaacagaagcaggaaatggatattattatgtaaggaataagaaggatcaaaacaaagtgttagatgtaagtggttatggtactgcaaatggaacaaatgttacagtatataatttccatggtgataataatcaaacattcaaattgtctaatgtaacaggaactttaacaagagaagtggagtcactctataaggcacagcctggtcaaagcagtagatcaagtaataatttttcacttgaacatcttacggcaggtaccaaagtacgagttgttttagaaggagcaggtgctacctctttatcatttaacatttcaagagataaatcaggtgcagactctagaatttggtcagctgttagagatggttctattctaacgatcccttcaggagataatagaaagaatttgtatatctcaggtcctcctagcggatatacttctaacggtacatttaaagtgaaattctacgctcttccaaactaaaaaatattataaagtttctattccttttatattaatctaattagaaaatgagtatgcatacttcaaaaatttatttcggcttgctcgattggattaactatattaataggaaatatagtgttctgttgcaaagttttgttaagagataaaaaggtgaggttaagtacagctaaaaaccgaagtctgagccatgacttcggtttcttttatataagcctagtgaaaggatagctgttctggaccgcagccacatttcctaataatgaatttttgtatttttaatcattaattgtccatcccttgaaaagggagaattagaaaaacatagtgtacaaaaacctgataaataaggattttacttttaatatatattttaaaacatataccattgtattgacgtgtttcaaatattattaagttgtatttttgaaaggaacattctctaaagaagaaattttacaatggtttaataaagtggtagctgttttaggatcggcccttaactatgaaaaggaattatgggtaaaacaactaaattaaaaaatgtgagtaaattaaactgctgactaatctcactttttatgtactaagtaagtagtgcaagtggattacgaatcgtaaaaatgctcataaaaagattgcatttatttaacttgaaatgatcaaggagatagtgaatagtatgtaatattttaaaatgacagataatcatactaatactcaaactggaggataagaaggatatttaggaatacatacaaaaaggccttatttttatatacaggccttttttgaatgacaaatgagatatgactcaatatctcatgtaggacactttaattatacattacttcaagaatttagaaaagaatcttcaacaaaagctagactaattacgacaacacattttcgtttatataccattttgcagaaaaatagtacaggctatcaattgaaaaaatagaggattgtgttagtccgtatgcctaaatgaagaaatcaaaagagtaggcaagctatgaatggattgtactaaaataagagaccattatatggtctcttattttatatagttgttttgcatggtttgtatagatttatagatattatcgaaattttctacttgttctagaccaaggtttgactttttatgtccatcaagaaattccattacattcttttgataaatttctatatttataggtgttgttgaattttttaagaatgtttttggtagcaagggcatatgagatgatttaaatgttagctcacttttaattaaataactttcatatagctcacgaacagtttaaatttggtcaaacttgaacttttcatttttgttaaaaaggaagtaaattggttcctttttgttaaggttgttattaatggcacttagaatactagataattctttcttatactcaagagtatctttatcatcatctttattagagcgggtaatcatagtacaacaatcaaaaaaccttaaagtattaataagtaaaatgccacttaaatccttaattacaggaactaaactatattcttctttctttgctttataatattaagcaactgactacgtagcaggagttgtagaaagaagctgatacggaagattatgaagagagaaagttttagtggaatttaagcaacagctgattaactgttagtattttgctttgtaaaaaaaattcaataatttatcgttgcaaccgcttcctttttgtgtataatgaaggtaagttaataattaaaaggattgttactgttcagcaggcaaaacctaaattgatctagaggctacgggtgtagtgtggcttttggaatcagtttaggtttttttattaccttttgtgactttaagaagaaggtggaacaatatgagaatccataaaatcttaaataacaatgttgtttgtacgatgaaggataatgagacagaagttgtacttatgggcagaggtttgggatttcagaaaaaagtaggcgatgcgattgatgaatctaagatagaaaaaacctttgtgctagaaacaagagaattatcagagaaactcgctaagttgctaactgaaattcctgtagaaaatttagagattacagagagaattattcagtttgctaagacagttttgccgggggatttaagtgattatatttatcttacattaacggatcacttaagtttcgccttaactcggcataaagaaggaatgaatctcaaaaatactctgctttgggagataaagaggttctatcagaaagagtttgaaattggtctacaagctttgaacatcattgaagaagagactgggcttagactttctgaagatgaggcagggtcaattgcactgcatttcgttaatgcacagcaaggagagccggcaatgcaacaaacggtaacgatgacgaaaatcgtccaagatattttaaatgttgtaaagtaccactataagatgaacttagatgagaattcatttaattatagtcggtttgtaacgcatttgcgatattttgctcagcgtttaatgcagaaggaattgagctcggccgatgatgattttttatacgagcaagtgaaaaataagtacgaagaggcgtattgttgtacagaaaaaattgaagcatacttacaaaaagcacataatagtcatctttcaaaagatgaaaaggtgtatttgacgttgcacattcatcgtgtaacgaaacgcaatgaattatgtaattgaataaacgggattgttactgtttagcaggcaaaacctaaattgacttgtaatggagtgattcgtatgtatcgcaccgttatggttaatttaggttttttctttttataaaaatgataaatgagatgattgtaggggggagaaattattatgaagtatgaaaaattggcaaaagacatactgaaacatgttggtgggagagaaaatatagatagcgttatacattgtataactcgcttacgatttcagttgaaagatgaggggaaagctaatacagaagtactgaaaagtatggaagatgttgtgactgttatgaaaagcggcggacaatatcaagttgtaattggtaaccatgtatccgacgtgtataaagcggttattgctgtcggaggatttcaagaaacagaggaagaaagtgcgagtgagaagaaaaagagtagtctaatagatattctctctagcattttcactcctattttaggggtgttagctgcaacagggatgattaaaggatttaatgcactatttgtagcgttaggctggttaagtacacagtcaggaacgtatcaaatattaaatgcagttggcgattcgttattttatttcttcccgatcttcttaggatatacagcaagtaagaaattcggaggatcaccattcatcggtatggcaattggtggagcattagtctatccggctctatccggtataacagcaagtgagccattatatacgttatttgcagggactatgtttgaatcaccaattcatattacgtttttaggaataccagttattttaatgaactatgcatcatctgttattccaattatcctcgcttcttattttggagcgaaagtagaaaagtctttaaagaaagtcattccggatgttgtgaaaacatttgtactaccattcttaacgttactaatcgttgtaccagttacatttctcgttattggtccaattgcgacgtgggcagggcagttcttaggacaggcgacgctttggctttataattcaagcccattagttgcgggtgctttactcggtgctttctggcaagtgcttgtcatattcggccttcattggggcgttgttccgattggctataacaatttagcagtacacggtattgatccgatactagcgcttatatttgctgcttcatttgctcaaattggtgctgtacttggcgtttggatgaaaacgaaagatcagaaattaaaaacacttagtattccggcttttatttcaggtattttcggtgttacagagccggcgatttatggtattacacttcctcttaaaaagccgtttattatgagttgtattgctgggggagttggcggcgcaatacttggcgtatttggtacacaaagttatatgacgggtgggcttggcatatttacgcttccgacatttattagtccggaagatgggattacagctggattttggggagcaattgtttcgatggttgtttctttaatagtaggttttattctgacttacttatttggttttacaaaaaagcaaatatctacagaaacagatggaacaattgataaagttgctgcatcaaacgatgatgaagtaatctttagtccttttcatggtgtagttatgccacttcaaaacattgatgatgctgcatttgcatcaggtgcgttaggtgaaggcattgcgattgagccttcggaaggaaagttattttcaccactatcaggtacaatttctgcgctgttcccgacgaatcatgcagtaggaattacgggggattcaggtgctgaaattttaatccatattgggatggatactgtgaaattaaatggcgagtttttctcctctcatattgaacaaggagcgagagtagaaaaagggcaattacttattgaatttaatatagttgaaattcaaaaggcgggttatattgtgacgacaccagttgttgttacaaattatgataaatatagtatgaaaaaaactgaagtagaaaagattcaagcaggagattctttactagagctaggaattaaatagtagttacatttcattatgtttcacacgaagaaaggcattctttgagaatcgtaatacctttcctcgttaaatcttatataaaggagtttttctatatgtctaaagttatttttcctaaaggatttttatgggggggagcgattgctgccaatcaagttgaaggcgcatatgtagaagacggaaaaggattaacgacggttgatctattaccaactggtgaaaaccgctgggatattatgaaaggaaatattcattccttcacaccagtagaaggagagttttatccatcacacgaagcaattgatttttatcatcgttataaagcagatattgctctttttgcagaaatgggatttaaagcgttacgtgtatcgattgcgtggacgcgtattttcccaaatggtaatgatgaaaagccaaatgaagcaggattacagttttatgataacgtatttgatgaactgttgaagcatggcattgaaccagttgttacgatggctcactttgatgtgcctgttcatttagtagaaaagtatggaagctggagaagtagaaagcttgtaaaattcttcgagacgtacgcaaaaacgatttttaatagatataaagataaagtgaaatattggatgacgtttaatgaaattaatatgcttttacatttacctttcatgggagcaggtctagcatttaaagaagatgataataaaaaacaaattcagtatcaagcagctcatcaccaacttgtcgcaagtgcgttagctgtaaaagcttgtcatgaaatcattccagatgcaaaaattggttgtatgctcgcagctggtgcaacgtatccatatacatgtaatccagacgatgttcttcgtgcgatggaacaagaccgtgaatcattcttcttcattgatgtacaagcaagaggagcatatcctggatacgcaaaacgcttctttaaagataataatttaacaattgaaatggaaaaagaagatgaagaaattttaaaagagtatactgttgattatattggatttagttattatgcaagtagagcaacaagtacagattcagaagtgttaaaaagcataacgagcgggaatgtattcggttcagttgaaaatccatatcttgaaaaatcagagtggggatggacgattgatccaaagggcttccgtattacagcgaaccaactttatgatcgctatcaaaaacctttatttgttgttgaaaatggtcttggtgcaatcgatcaattaaatgatgaagacgaagtgaatgatgagtaccgtattgattatctaaagaagcatatgatcgaaatgtccgaagcaattcaagatggagtagatattatcggttatacaagttggggcccgattgaccttgtcagtgcttctactggcgaaatgaaaaaacgttatggatatatatacgttgataaagataatgaaggaaaaggttcattaaaaagatcgaagaaggacagtttcaattggtataaagaagtaattgcgacgaatggtgagagtttaaaattttaattaggaaaaggaggcaccttgatgtatgtcttttagatatgtgtaggtttagacaaaaccgttatcttgtagtaagcaaaaagagcatacatgtaagtatgctcttcgataagaaaggtagatctctatgagcggagagactacatacaaaagcgtatgtttgtttcctttaaatgtgaagaaaaatcaacaaaaggtcaacgtaaatttaataaaaattcaacaaaaccgctattttaaataaaagagcagttagtgagatctaactgctcagttttttgaaaaataagaattagaatttgtttttttatgttttacatcaattaacgaaattgcattagagaggttaataaatttttatggatacgcaataatgtttggacatcgtcttcttgaagctgctgtaatgctagggacatcgctttgtaggaagttgagttttcaatggattttttcgatgcctcttgtcctttgggtgttacttttaattttatttctctacgatcttcatctgattgttttcgttcgatgaactctagactaactaaatcatctacatttacactcactgtacttttaggaactgaaagacgttctgaaatctctttcagagtgatattagggattgtataaattgtatttaaaatacccatttgttgtactgttagccctaaactggaggcattttgatgtgtgaactttataatttctttgttaatggatataaatgactgaacaacttctccagctagtttgaaattgttgtcttttaaactcatgatactcaattcctttctttcttaaattagcttaacataggatagttcagtgttgaactatttatttataaactaattcagaaaagaaagcaccatattgtattgatagaaaacttaatgaaaatttcattttgtattaagttggaatataaaaagagcacttagtaaagtgctctcgtgacgagcctcattttataacgactattttataaagaaaggaactcagaatattatatgtgcgccagtcaattgagtaccttgtacaaataaagagcagctagcaaaagctaactgctcaggtaatggaatatggttcgaaatgggttgtctacagtattgacggaatattggtttttattcgtgaagaattacgtttaacttaatgcatagccaacggtcaaagttagtgttaaaaacactgataataaaagtattagtagaacggttgctatgtttctaagcatcgcaacccaattatttattttagaaaatcctttcataccagcaaaaaaagttcctattgttaaaactagtaaaaaaataaagggtggataggtagtgaattcataataaaggttttaacgattaggcatatttaagaatctcgaacataagatggtaatgacaccgagaagaattcattgtgttcgctactcgcgttaatacgttttgaaaaggcacctatttaggtgcttttttgtttacatctttcgagatagacgagcatatattggaatgtgtggatggaaaccattttatatatcagagcacctatcaattatgggtgttctcttattatgtaaaaattttataagttgtgtgggagttgaaaaatagtatattatctttcttaatgtacatattaataaaagtttttaatatcatacataaaaggcgggataatatgagtgaaaataagaaaaatgaagaattgaataagataaagaaatattattttaatgaggacaatcaaccagtagctggtatagagctaattttgccgccggatataggaatcatgttagacccgaaatcagttaatgatgaaagtagagataaataagtttaatttaagcatccattcgggtgcttttttctttgttatatagaaattacacatgatccccctttaatacatgacttaggcatagttgggaatgagatatcatataatgatactgaacggtttccaacatgttcccctatatttttttaagcgagagcacttattgggggagtgctctctttcgtttgcacataaggaattcccaaacatacaatatcgagtcaatgccaatcaacttattccttttccgatatatatatattccgctataaagcccttttaggttgcgccattagaacgggcaaggcattgtcgtatattttatactcagaagcttagggcactttatagtgttctttttttattgaacaaaatggaaatttgaatagaaaacatatccttaaaataaccttaatttaactatgaatttaataataactgaaaactaaatggtataattttctaaagaaactcaaataaagtttattttagaaaaggggtagaggaaaaatgtttcagaaacttaaattttatttaatgagcatattaattagtgcatttttaggtgggattattataggtgctaatttcttggtacataacatatataatttagttgcaggtaaagaatatcaatttaatatgtggtcttctattattatatttagtgttgtatttatttcgggtttctcgtacatgttgaagaagggaccagatatacttgttaatgattaaaccaatagcaattatcgtaggcgctgccgtgatatgggtagcgtcttgtttgttgttaaggaaagataagggatgagatagacttgcaaattgaaatattattagtctaaaacataaaatatagactagtaaacaagctgttttcaccttttaatcatagaatatgatgaattctatttttagaggagggaatcatatctatgggatggaataataattttggacattctcgagattgtaatagattttgggatgatttagtattttgcggatgcggtcgtagacgtagaagaaacgattttaacgactgtcattgtagacgcgattgcgattgtgatgagtgtcgtcgtagacgtgatcatgaccgcaatcgtgatcatgatcatggtgaacatcgagattggtaaagtcttttgaaggagtgcatatcttaatagcactcttttttattttataaagaatttactttaaacatttcttataactaagaatacttatgtaaatataggaaacatatttgattcttggaatgaggggatcgatgtggatataacgcaaagtattgcaagaatagttgctaatgggatagatcttccgtttacttcagttagaacaactgcgtggattaatggacctgcaaatgatttaattgttacgactaggcaaagagtgaatgagctttatcgtgttatgtggtcgcgggtgccagttatgctaaaaatgtatttcattcagggggcggacatagtaagatttgctagagttgcaggagttgatgaaagtataacgggagaatatatatatcattttatttggtgataagacaaactttaagtaacctaacagctgcttttttattttataaaaaaagaacctgcaaacctgcagattctcctgataatgatttatggagcaagacccgaaaatataatataataattcgaaaatgagttcaagtaaataaaaagaacccgctggagttcgggtcctttcagaagtgatgatgtattctcggcttgggaactgagaaaaacacaaaaatataatacatcgagttttagagaatttcaatattaaattaaatattatcgtggagggagttatatcatttgatgaagaaaacaaggtagtgataaagcatatgaattttaaaaaaatgagcgggatatcttaagaaaacataaaattattgaaatttttgtatgaattcattaatatggaattatatttattgtttaattgattccgtttattcccacaccttattgtgttgtggttgagttgtagaagcaagttgcgtcttgttttatttatgaaagggcttttttgagccgattagtgtatatatagcttattttgctatgcacatttttaatcgacttgaagaagccctttttgtattgtcttcaagttaggaatcatttgtaaaaaggtctttagatttaggtatataaataaaaaagggggaatctatttgtatcatgtctatttcaatggatgtatacgagatttccttttttattggagagatgctttagagggaaaagttatcgctttactgcaatccgtgattttctagaaatggatgccgattctacacagctatcatgtaaaaactgcagatgtggattgtctttttaagaaagatgatcttgcaaagattgtgcatcatgattgagtgttagaagtggttaagcgtgcagaaaaaagtaaactttctaaaggtagattgaaaaagatagagtttgtaattctatctttttcttatattcaattactacagaggatttaaattcactaaaagaaaggtagaagagaatatgaatacatctatgaaaaaaatctagtaaatttacgagttgattttgctttcaagcgcttgtttggggtagaaggaaacgaggatatactcattggttttcttaatgcggtattacaagactctttagatgaggaaattatttctttgcatttagatgatccacatcttccaagggaacaaaaggatgataaattgtctattttagatttgcgagctacccttaatagtggtataaaattaaatatagagatacaggttcgcgacaaaaaagacatgatcgagcgatctttgttctactgggctggcatgtattattctcaaatgactcaggggatgaagtatacagaattaagaccaaccatttgtattaatatagtggatttcattctgtttccaggagaagaggactttcataatatcggtgtagtcatgaacaaaaaatcggagcacataatttcagagaatatgcaattgcactttcttgagattccaaaggttattcgagaatggcaagaaaatcgaatggatccatgggaggatatattagcacgttggctattattatttcctgcatatgaagatgagaaattaactacaatcctggagggaatcgcgatggaaaaagatccagttttgaaaaaggcaatagaggattgggagcgtttaagtagtgataaagactttttacgcttatatgaggcgagagagaaggcaataaaagatagaatatcagaaatagagacggcagaagaaaaagcagcaaaagaagctagaatagaaatgattcataatttaattaaagtaggtgtacctatagagaagatagcggaagccgctgaattaagtgtcgaaaaggttaatgaaattttaagaaacaaagagtagatagaagtagtgaaaaacaggtacttgtgaaaaacgcacaattacctgttttttgtttctaatgaatagtttgataaacacaaggcttagacactccttaataggtagtatactcttattaaggagcataataagttgttggagagattaaaatgaataagaaaaaagaagcgcatacccttagagataaaattccaaaatggataaaatagaatcatgttgctcactgaaagaagatatacattcttatcaagacctaaattgtaaaaagtcataaagaataaagtgcgatacatattagacatgaccaatatgtatcgcacttttacttcatattggggtcccgccacatcgctatcaagctaatattttgaagaaccaccaaaacaaaaattttacctctcgacagttatatttgagaattaagcttattttttcgttttggggtgaatctgttttcttaagttgatatgcatgtatggtgacccctataagtggcgttttttaccgttatcgatttctatcaatacctagtgacgttaataacagaattgccaaatttaccgattcaccagcagctaacgatttgaaataattacatgccttggtcgaaaaaaatccaagccacatgtgcaaactagccatctatccgaaaaaaattaggatagatggccattcatcgtgtgtaccgaaaaggtggccctttttttatatttcgggcttactttccactagaaattgaaatactaaatttagactgttgattaccgaatcgttccaatgtcccctcgaatttcattccaactctttttaatagtccacaagattccatattaagtgactgagtttcagcgacaatagtggttaagtttaatgcactaaatccatggtttaatactttcataatcacttcttttgcatagccttgaccccaaaactcaggtaaaaattgatacccaatctctgtattaatcccatcatgatatgtatcaaggaaaacaaaacctataaattctttactatcttttaaaaatactgtccagtggagggagctattttttgaatttaatatatcataaaatctaattttatatgcttcttcgtcgataatacctcctaagtattttcttactagctcgttttcatataattttttaatgtttttataatcattttcggaaattacgtgtaactcacatctctcagagaataacaagtaaatctctcccttcgataattattattattttcctggtaatccacctatgaaaaatatgtgctctacttacaaaatcatataaaacatacatcctttcttatttagtcttccataacatggtatgatgtgaaatgcttaccaggtcaaggggcatttatcaatttttttgtatgcgctaatatgtagtgggaagggagtgtgtatgatgacaaatattaaaaaatcgcagaactggctggggtctcgatttctactgtttctcgtgttttaaataattatccgtatgtaaatgaacaaaaacgaaaagagatattagcaattatcgaaaagttaaattacacgcaaaattcgaatgcgattcatttagtacgaggaaaaacaaatgttattggagtgcttcttccatttgtaaataatcaatattacagtgaagttatagaaggtatttcaagagaggctgtaaaacataattacaatatgatgctctgccaaacggataatagcgcggataaagaaatagagattttgaatatgttaaagatgaaaaagttagacggaatcattagatgttcgaaagtcaatgtctgcacaggccaaagggacattatcttggtgctctcatacggattccgaagccatcccacaaactccaccaagtcctctaatcttatatgcttgtaatctttctctgtttcctgtaagtacaagaaatactgtttgagtacaacaataagtcttccgtgtgttgctgcttttccctgtaacatccaaatacttgaggtacttcaccacaggaatcacaggaaccccatctgaatctactaatatgtatctctttccattctctaggatcacctcttgtacacgcatagttcttcacctcttaactccgttgtacgatcggtctctcgaccttgctacgcctcacgttgtgggctatattccctaatacaaaatcgaacgtaagttctcgtattattgtatacataatagaccatactttcaacctctaattatggaatatatcatgtaagaaaaaagcggatttatgccctaatattggacatagtatccgcttctaattatagtctgtttaagaatgctttaggtcttaaggacggtaatattttttttattcttatagtatggtacgatcctaacaaagagggtataaataaaggtgtaaacaaggacttgtttttataaaaacgtattgctataatataaaggtaataagattttacaataaaaatataaaattaatcagttcgcatataagagaagacctcaatatgcgccatgtccttaggggacgtgtgcgtgtattggggtctttttgcgttttgcgagcaaaaacatccggaggtgcaggaattatgttgaattggttgtctgcaaaacttatgacaacatcagtaggagatttcttactggcaaaaagtagctttacgaaggggcttggtggtagtggcagtggtgccaatgctgaaaccgtccaaaaaagcatgaacactttggtgaaaaccttaattggttttgggggaatatgggtggcagcttgcgttgtatttgcagctattaaactatctggtgcacaagggaagaatcctgaaaaccgtacacaagctatgattggtttagcctgcgcagcaattggaggctttgtgatgatcaaagcgtacgatatcgctgcttgggttacgacaatctaacataagagtttgtacaagctttcctcgatttggggagagcttctcttatacaagggaggaaaaagaatgagaaaagtaaccgttcctgttgatatgacttcggaacaaaaaacactactaggtgtgctgagcaagcgccaattgatttatctattgggtggcggagcatccctttatttatatgtaccatttttatggcgactatttgcacctattgatgcagtagtagcgttttttatttgcttaattttagcactaccaacggtaataggtgttatagcgtttgcgtttatatataaagaaaaacaacatatgtatctagataagtatttaattattaaaatgcgtagccgctccgaaaaaggtaagtggagaaaagggtacgagccaactatatgggcaaaggagaatctgtaaatgttagaaatgatatattttgcggcgatagccattgtaggatttttcttttatcggaaaatgaatggaaaaccactgtttggttctaagaaaaaagggaaaaagcaaggtggagtagagaaacacactattgaaaaagctggaaagaaaaataaaaaaaatatgtctgctgaatcggaaattgatgaggataatgttgacttctttcgtgcttttgtagaagacattaaggaaatcgataatcatatgattcggtatcatgacgacacatttgtcctgattgcggaagcacatccagttaactattacttactttccaatatggaacaagaagcgattgatatcaaaattgaatcatggttaaccacattagagtttaatacgaaagtatatattcaaagtaagtttgtagatttaacagatcctgtacgaaaaatgacagaaacaatgaaaggtgcgaaggaccttacaccagagacagttctatatgggcaagaagttatcgataacttagagtactggcaacgttcgcaacctcgatatgaacaaaaacgttatttaatttacccatacaaggttgatattagtacgattactgctgatacagaggaagagttggaagaaaagattgtggataaggcgtttaacgaattatatcgccgttataatgcttctcgaaatctactatcgaaagcaaaaattaatgtagaaatgttaacgaaagataaattaatagaacttttatacgtagcatttaaccgtcgtaaagctgtaaaagctcgtttccaggacttaattgaaaacgagaatttctccctctattcaacaggagaaacaaatgaaagaaaactagagataatgaagaaagtgctagcggaagaaaaagcagaaaaatcaaataacggggtggcgtaaacatgaggttattcggaaaaaagaaaaaggaaaagaaaaaaatagaagcagaagagaaggatgaattgcagctagaggaggaagaggcggaagaagaggaagtaccgacgcaattagataatcaaacaacagtgtttgatgttattgctccagaaggaatgaaaattgatgcagaagattatggggtcattaaacaatctttaggaagtaatacgttcttccgtccgttttatattccacgtgatgggtacccgcgtatgatgcaaaccaattggctcaacatgttaacttcggctggggaagtggatgtcatgatcgatattcataaagaaccaaaagctaaagcaatgcgatcattagatatgcagttgacgatgttacgttcgaatctttctttccaacgtacacgaggaaacattgaccaagaaaaagacttagatgcaaaaattcaagatacaaacaatttaatggatgaaatccagttcaatgaaaacgactcctatatggtgagtaccatgggtgttgcgtatgccgaatcaaagaaagaattggacgttttatgtgagtatattgaagatgaaatgcaagcatctcattttaagattgcaagtacttggaaccgtgtgaaaagtggtttgaaagctactatgccattaggtgcaccaaatacgctgcaagatacctatcgaaatatcgatagacgtgcgttatgtacgtttgcaccatttgtatcaggatccgggagatttaatggtggcataccaataggaaagaataaaattactgggcaagtagaatttttaaattcatttggtaatgcagattatcgcccgccaaactataacattggtgtaacagggatctcaggttccggaaaaagtttacttttaaaaatgaagttagctcgtgaaacgtcacttgcagatacgcatgcaatgattatcgatccagaaggagaattcgtaaaaattacaaaacgtctaggtggtattaatttaaatatttcacctgaaagtaatatcattatcaatccttgtgcaatcgctgtaacagaacttcagattacggataaagatgaagagctagaagcacttgaacaatatgataagaaagaacttgtagagtgtgatggcatgaagtatgtgagatttgtaccaattttagagaaaatcaatgaaatactaggtttctttgacattattattcgcgggcaagactttgatcaaccaggattaaatgtattccaacgtactatgctagaagatgcaatccgtgaagtgtttgataaacatggtattacttcacatccttcctctttatatacagatgaagtgaagaaagtggatggacagttaattcagtctcaagtgagaaagccagagccagagttaaaagaaatctatgatgtcatagtagaacatcatggagacgatgtaaaagcagaagagttaattgctgcgattcgaccattcttacgcgatggttcaaaaccattatttgatggacaaagtcattttggtcgtggtgtggaaactcagttaaatgaatcacgcgttgttaatttcaacattagtcatttagaggaagggtttttaaaaccaatcgctttccacgttatcttgaactatatttgggagcattggattaagagtccagaacatgctatcaaacgaaaagtactgtatgtggatgagatgtggcagtttatcgattatgaacaaacggttaacttcttagaaaaagtagcacgtcgttcacgtaaaagaaatgccggtatgtgttgggcaagtcaggactttgttcgtatcttagaaaatgtaaaagctcgtggtatcttgcaatctactttctcttatttcttcttagaacaaaataaaattgataagaaaaagatccaggagaactttaacttaactgctggggagcttgatattattctcaacaaccctggaaaaggagaagggattttccgtgtcggagatagttcggtttggattcaaactgatccatctgacaaagaaatgatgttcattgaatcaaatgaagcggtactacaagagcttttaaacaatatgaagaaagtacaagggtacgcaggataatggcgtactcttaaaaaggaaggtgaaattatgcttgagaaaatagtagagtgggtcggaggcttaattattgctatagtaaaggcttttcttagtccggtgtatgcaactttggatccgctgccagttttagtgtttggaggagagggaacagaaggaaaggggacaaacttagatttcttattttcaggtaattctctaaccaaagtattagacacaggcatgcctgtcatgttcaagcttgttgctttttgtgtccttgtcagtgtagttattacggcggcaaaatattcggcaacagctattaatccaaataatagaacagcattaatagagtatgcgaaggatttgatgatcatttcaatttttctttggcacctcgattacttctatacactcatatttgaaatcaattcttggataataatagagtttagagacgctgttaatgtagcaagtgggggggattttgatccagataagggtactaaatttctacaacctggatttggtggggctggacttaccattactgagctgggtttgaaaggtcatgaaaatgactatatgtttattatatttggtttgtttatagaagctggtctcatcgtctgggcaaacttttactacttaatgcgagcggtgtcactatacgttttaatgttaattggtccgttaatggtaggtatgtggctatttccacaaaagaaacaacagacattatattggatacgtgaatttataggagcggtgttcatacaagcaattcatgcaattaccttatggctcattatttctttaattggagcagcaaatagtccgttaatcaaattaattttacttgctatgtttatcccaataggtgagattgtaaaaagttttattggccttagtaccaatgcatcaggtggcattcatagagcaggtacgatgatgggtatgggtgctttagcaagtgtggctggactcgttaaaggtgttcgtgatgactaccgtaattcaaaagcaaaacctgatgataaaggggataaagaaaagacaaaagaagatgctgataacccgaaagatgcattaggagcgaatttagggacagatgttggtacaacatctcgtgcagctcgtatgttaaaagctggtcaaattggaagttcaattggtaaagcggctggtggacttgcaggtatgacagcaggagctggtcttggaccagaaggaatggcaatagggacatttgctggcagtaaagcgggcggatttactggtgcagttactggaagatctgctgctgcagttggcgaaggggctgtagccttaggaaaacatattggttcgagtgtaaagaagggtgcggatacgtattcaaatctaaatgacaaatcttatccagaactaaccgatgaagatattgcacaggatttagctacaaaagattttgaaaattggaaagcggataatcccgattctgcagttgcaagtcgcttaaaacacgcattccctagtgcctccgatgcagagattgctaaaaaagtggcaaaaacaaacaatgatcaaatgtctcgtttctcaaatcagcggaaacaagatttacaaaatatgaagaaaaccgctacaccatatggaaatgctagagagttagttaacgctgcaacgaatgcattccaaaagggttatgaggcagaccataaagatacgtttatgagtcagttaccagaaaatatttcagcggaagagaaagagagacactggaacgaccacctgaacacaaaagtacaaggatttagaaaccacgcagaacaggcggcaacaaaagcaggagccatgccagttgatgcgaaggataagcaaggaaataatctgtttgataagtcctatgtgaataaagatgcgtttgcttcccgacttgcattaggaaaagtcggaaaagcagttgaggatgtaaaaggagaaacgttagaaagtggccatcaaaatatgggacaagtaggtgctcttgtcggtgcttctactgctgcatttaagaaagcgtatagtgcagaccataaggctggattcatgaaacaattccctgcagatatgccgcaacaagaaaaagaagccgcatggaataaacatttaggtcaaaaagtacaaggatttcaaaatcatgcacaacaagcggcggaatcagctggtattgtacagcaaaaagatggtacaaactatgcgaataaagaagctttcgcttctcatttatcacaacagttacaaaaagatcctggtttaaatgctatgggtgtatctagcacagcaggcattcagaaggcagtcaacggtgtgaaaacgcacggtttgacaagtggagcaggaagccagaaagcgaaacaagtaagtaatgttgagaacctggtacaagcctctacagaatcctttaaacaaggctatgcagcagaacaacaggcaagctttatgaaaaagttgtctccaactatgtctcaaccacaaaaagagcaagcttggcagtcgcacctgaatgaaaaaggaaatgaatttaaagcagtggcacaacaagcggcagtacaagcgggagcgatgcccgtacaggcgaaagatacgagtggtaagagtttacataatcaatcgtatattaataaagatgcctttacttcgcaattaacgaaaggattacaaagccatgcaaatcttggaacagtgagtcaacaagtaggttctggaattactagtgcgattcaaggtgttcgttcacatggcgttgcaacaagtagcgcaatcaataaagcagtatatgcagcgacacgaacgcaagccagtatcgcacgtgcaggagatctttccgttgcggaaattgaacgctcttatgcagatgcatcaacaagtgtagcaaatattgcacaaagtgctggtaaaatgtctatcccaacatctgcagtgggacgtatgacacagcagagtacaaaacttggcatgagtgtaatggaaggtgcgaaacaccttatgcttgcggatagcattgatacggtatcaaatgcatactatagtgctgcgagtgctgtacaacaatccggagggaatgcagtacaaagaatgataagtggaactaatgctgctgttaatacatcattaggagggaatgcagcagagcgtcactataatgtgacaaaaggcttaagttacgccgcaggtgtgattggtggtgcaggtgcttatcaagcgactgcacgtatggtaagtaaacataatccttataacaatgctgttcaaacagaggcaaaagaaattcaagagattcagagaatggtaccaacaacaacggatgctactggaaaacaatcggttgttcaaggtgcagtacgtcttgttacgacaaataataaatcctggattgaagcaaaagattctagtggcgtgacgcaagttgtatctcgttatgctagtggtgatagtagtattcgttcgggacaagtcgtatatcaagatttaaatatttcggacggacaattaacgcagtaccgtaatggtatgaaagctacaccagcgtatgttcaagattctagtggtgggaaaattagtatcaatcgttctatcaacgttaacccaaatcaattagtaggaaaccaaaatcaaaggtcattacaccagaaatcagtatttaatgaaccgccacttacggtcaatcacaaggtggacaatggtcacttctatatgtctgatttagaccaaggtggttataagaatgtacaaatggtcgtagaaagagatcgtagttatatggttgcgacaacaacagacggtacactgtcacgtatttcgccattcggaaaaggagatacgcgcttacaagcaaaccaaaggattgaaagagcttgtgaagtgaaggacagtagtattaagccaagagaagaaattctagtaacacatacacaggacaaggttgttcgtacagagacgcacctgaatttatcagaacatgacccacaaaatctgattccatttgcgccaaaccctcgcttagcacagcgaagaggaagaaattctcaaaatggaaaatatggtgtgataagtctatgagtcaaaatcctaacgatccaaatgaacagaaaaaaagtaatcctttaaaagatgtagcttcccactttattaagaaaaaagggatgcaagcgcgcgggaagatggcaaaattggcagggaaagcaggaaaggcagcagcgaaagctgctgccaaaatgctaaaagcaggtatactaaaaattgtgggtgccgttatagcagcggttggagtacctgccgctttaattatgggagtaattattgctgtgtgtgtgattttagtctcttttgtaccttttactgatgatgaaggtaagacagaggaacaagtaaaaaaatatatggaagtctcaatggctttgaatgtggattggaaagaggtcgtcgcctttgacatggcacgatatgataatgatttaactggtaaagatccgcatgatgctatatcatatttcttggatatccaatatgaagaatatacggaaaaagaggtatgcgaggaaggaccgaatggtccttgcgaaaaaaagaaaaaggagatgcaaaaaaccaagtctgaaagttattctggaccagatgtaaaaaagatattaggagatacagattttaagaaaaaaatagatgagattaatgcgagtggaagtaaaaaagtgacaacatcttctcatgggctagagaaagccatggaactcgcaaagtttagtaaaagtcaaaaagagcgggctcgtgagatattagaagccgggatgttagaaggaatgtatggacatcttgctcctactactggtggatatattggtggtatgtgtgtaggtgctgtgagtccaggtggagaacctgtcaatatcaatgaaaaggtaacaggttaccttcctaaaattaaagagatggcggaaaaacatggggttgctcaatatgttggtattctcgcagcccaaatgatgcaggagtcagctggagcgggaaatgacccgatgcaagcagcaggcgcgacacgtttctctataagcgtttagacgtgaagtgagagtgttgctgaaagattttgtacatgcttaaacaagcgaaaatgtacatgtttatcttgacatttacatcattatggtacaaccgtgtatacatttaccaaacaaactacatagtttaaattagtaaaatatattgagaggaaggaaataaatctatgaaagtcataattttgtgtggcggaaaagggcttcggatgcaaggaattttagaggacattcccaaaccattagttcgagttcaaggaaagcctctcctcttgcatataatgaattggtatagaaaatatggacattctgatttcattttgcccttaggatataaaggtgagaaaattaaggaatattttatggactttagctggaaagagaatgactttagtttgaattttaaaaccagtcaatatacgctacttcagaaattagaaaattggaatatacactttatagatacaggaattgatacaatgaccggggcaagactaaaaaaacttgaatcctttgtacagggtgaaacctttttattaacttatggtgacggattagccaatatagatattgatcaactaatagcattccataaagaaaaaggaaaaattgctacattaactggaattaaaaaaaatagtcaatacggcctattggcggtcgaagatggaattgctattgattttaaagaaaaaccattacttgatgaagtaattaatggcggtttttttgtatttaacaaagaaatattcgattatttaagtaataatgatgattgtgttctagaagaagatcctcttcgaaatttaataaaagacaatgagctcgcagtctatgaacacaatgacttttgggctagtgtcgatacacctaaagatttaaaaactgtaaatgaaagttggaatccaaataaattttagtggagaggactgaataagcattgaactctaatgataaaaaaataagtttacctcgattgtatatcccctctaatgagaaaatagttaacccactttcaacaggaattaaagcttcaaatctctccaaaaaaaatactcaaaaaagaattgatccccaattctataatcaacaacatgatctaaataatcatttctgcgtcattgtaggtagtgagtatgtcttgaaaattattgctttacagcaatcattaatgcagtactcagaaaaattcacattgtggatttgttgtatagatccttttgcatattcactattaaaagaaatgagtttaattaatgtaaaccttttacaagttgaagaattggaagatcgtgaactaaaagcaattaagagaaaaagaaaagtaaatgaatattgttggactttaaaatctgtcttgatagaatatttattggtcaattatgatttaccatctattctatattgtgatggtgatttatgctttttctctgaccctaatattatttttgaggaatggggtgaccattctattttcctaaccccccaaagagatcgtgattgggtagaaaaaatgtatggaaaatatcaggctggtctaattggatttaagaatgatctctatggactaaaaagtgtaagatggtggaaaaataaatgtatagattggtgcagtgccgaggctgaggaggggaaatttggagaccaaaagtatttagattatatccctatatattttccaaaagtaaaaatttcaaataacttaggtataaatgctgcaccttggaactgtatatataataacgattataaaattgacaagactaaaaacgatatatttattgaaaacgacaaactagttgtttaccattttgcatgtattactatctttactgaaaatgattttgatctttggtctttgggagaaatttcaatacccaataatatattaaaccatatttacactccgtatttagagagaattcaatttgttttaaagcaattaaaggataaattcaataaagatactaaacaatttttaagtaaaaaagatataaataaagctcaaactttatataaagattcacaattaagaagaaaaatgaatcaatccaatcattttatgaacttttccatgattataagtaaagaacgattaattcaaggattgacctcttattattccttagaaaatttcaacgctaaatttactgtatggatctgttgtatggatgatttaacttatcaaatattagaaaaattaaaattaaagcacgccatactaattccggtacaagaaattgaaaatcatgaactcctcagtataaaaaatgatagaagtttacaagagtattgttggacattaaaagcgcccctatgtctacatgtccttagtctttatccggaagttgatcacattatatattgtgatgctgatatgtatttctttacagcacctaatatcattcttgatgaatggtggaagtactctgtattcctttgccctcaaagaagctctactgaaattgaaagcatacacggtatataccaagctggtttagtaggcttcaagaacgatcaaaatagtaaagaaattttaacatggtggaaagataaatgcctagaatattgcaataatcaatatgatgttgaaatgaatagatggggtgaccaaaaatatttaaatcacattcctaacatcttttctaatataaaaatcatgactcataaaggtattgatgcagcaccttggaatgtcattttaaatagcagttctatatccaaaacagataataaagtttttattgatcaagatgaattaatagcttttcattttggaagtatgcaaattattaatccaaatgagttcgatttatggaaacaagaaactttagaattacctccagcagttttagattatatatacattccttatattgaacaattgaacaagacatgtcatacccttcataatacttttcaaaaatctccctcctctttatttgctgaccaaattgatacaacaacaataaaaaattattttaaatacccctccactcatcacaattaagactgatactttccttatttaaaaataaatctatttatttcagcaactaaaaatacatcttaataaaggatagattatcactatgattgcttcatttaaaaataaaactttccttattactggtggatacggttttattggttctcacttggcacgaagacttttaaatttacaagcaaaaattgttcttttcataagaacaccatcaaactcttggagactaaaggatattctaaaatatattgaaacctatgaagtagatatacgagataaaaaacaagtacaagatgcaataaagaaaattaatcccgattatatctttcatctggcagcctatggtgtaaattctgcccatacagattacatccatgctatagaaacaaatgttatagggacttgtaacattattcaagcagcaaaattggtgaattgtaaaaaaatcatcaattttgggagtagttctgaatacggtaacaagatggaacctattcatgaaaatatgttactaactcctgtggacatctatggaagtaccaaagctgctgctactatactcgcccatcaaattgctagcgaaaacaatattaatcttataacattaagaccttttggcatattcggagaaggcgaagagccgcataaaatttttagctatataatcttgcgagtattacaaaacaaagatgtaaatttaactttatgtaatcaattaagagattattgttatatagaaaatgtaatagatgcctgtatcctagccgtagaaaatactactgtacaaaatgaaatctttaatattgggagcggcactattcaccccttgaaacattatgtagaattattattcaaacatttgaaaaccaattccagaccaaattacggtgcaatttcctctagaacaaatgaaagatgggttcctgaagcggatgtgcaaaaaataaaaaactctcttttctgggaacctagaattaatattgaagaaggaattataaaaactgttaattggtataaaaataataaacatttatacctaaccccctaaaaatagggtactaaaggaggtggactaattgttaaaccaaaactttaataatgctttttacggaaaaagaattttaattactggacatactggttttaaaggttcttggttatccctatggttgaatgaattaggtgctactgtaatcggatattcattagattctaaaaataaaaatgataactttaacattactaaccttcaaaataatataattgatattcgtggagacattagagattttaataaattaaataacgtttttacagattataaacctgaaattgtattccatttagctgcccaacctctagttaagtattcatatgaatatcctagagaaacatacgaggtaaacgttgtaggaactatgaatgtactagaggcaattcgattacatgaatcagctaaaataggaattatggtgacaagtgacaagtgctatgaaaataaagaatggccttggggttatcgtgaaattgaccctatgggcggccatgacatatatagctcaagcaaaggatgctgcgaacttttaatttcttcctatcgtaattcttacttttcagaagaaaaattttctcaacataagaaaataattgcaagtgttcgagctggtaatgtaattggtggtggtgattggtcaatagatagaattattcccgattgtatacgagcattagaatcaaacaaaaagattattattagaaatcctactgctattagaccctggcaacatgtactagaacctttaagcggttatttactccttacagaaaaaattataaataatggtatccttttttcaggagcatggaacttcgggccatccctaagcaatattgtttcagtagaaaaattagtgacaagtttactagatatttggggctgcggggattggacagcagaaaatataggtccaataaattttcatgaagcaaatttactaaaccttgacattagcaaagcaaaattcaatcttaattggcagccaaaatggtccctacaacagactttagaaaatacaatagaatggtataaacattataattcttacaccagttctgagatgagaaatctatgtattagccaaatcaaacaatattgcatgctttgaactactcccacttacccatacttgctgtgagttccttatggagggagtcttcttggttaaaataataaaagatacattaatttttatagtctaaattataaacctactatacctaaaattatgtgattgtccattaacaaaaattttatttcttcggttatttcaaatcaactattgacattatattgaagaataaaggaatcacgtatttttctagtgattcccttgttctgagaaaataatgtcttgctttaacgacaatacagtatatgtgattattaatttatttgttctagttatgaaaaaatctattcctgtcaaaagagctttcttcaaagaaaaacttcctttttttttttacttatcctactcgaaaagtaaataatgttatttttcagataattatatctactatttatagaattacactgagctttaacaagtttatgcttatatattgattctcttatttattatcaccaatgttgatgaatttatgcatagcttattctatacacaaatagctttttgaattatcttttcagaataaataaaggagactttctcttttatgcactttccccttaccagtcttaaatttccctttaatcaacaataagaacaaatcttcaatatagtacatcttctataaaataaaaccatacgtaagataattttactattacaaataatgacatagtctgtttcaccttttacattatctaaaaaagaacttgtaggaattcttacaagttcttttttatttcctttattctcttcttatttacatacgcaagatttatacatttggtggtgatacatactatatttatccgataaaataatctaaaaattaatacataattgatcgttttaagaaaaagaaatttcataaatcttcaatcacagttcttagttcacctaatagaacgtataaagactcatatcatcttttgattatttttggatgttttattctacgtatattcgacacaaattgattgttttttatgaattttcttgaaaaatattgtaatatcactccattttttcttctattttgttatgatgtttataattaaattggattaggatttttttagaaaatgggggcgtatattatgagtgtctcagtaaaaggaaatgagcaattaacctctctattgaacgactggtatcgatctatgctatctcagcaagttataaaagctactaatctaaaaaagaaaattgatgaaaaaattaataagttaagcattgaaccgaatcaagagcatcaggatcaaaatttgttactatactattcactactcgaatttcgttacaaggtcttaacagatagccttggtattcaacaaaatagttttgatactattagcgattatgatatgcctacagatcaatttctacaattctattatcattttttcaaatccattcattccacttttatatcaaattatactgaggcagaggaacattataaactagcagaaaaaatattggtagctataccagatgaaattgaacacgccgaattttactatagaattgctactttctatcaccatacctataacaatctcgcttctatcgaatacgcaaataaatcgagagcaatcttttcaaagtacgaaggttatgaagtaaaaacagccttttgtaatagtttgctaggtggttgctgcatctatttaaaacagtacgaacaagcagaagaatatctacattgtgcaattgatttactacaaaaaaatagggaagaagattccttgttatacgtaaaaaatactatggggtggctgtattctgatcaaagtatgtctactttagctattcgtcacctttcagaagtaacagagaaaatccctacacacttcaaggccatcttcctacaagctaaggaacattataagttaggagaacaatcaacggccagccaactcattgataagggactacagatttgcagagagattcataacgaagaatatacacaccacttctctattttaaaaaaattaaacgaaaatattccattggaagaattagaaaaaatcattcaagaaggaatcttatactttgaggaagaagaattatgggaatatgttgtcgaatacgccgaattatttgccacaaaatgtagacaattagagaaccaccaaaaagtaagtgactatttccatatttgttatcaagcaagacaaaaatcaatcgcaaaaggagtgttaaaataatgaaaaaaattagcttattattatcaagcattgcttttattggggtattaacggtgggaatttttcagttttctaaaacagatcagcttgctactcatgggcattatcctgctccttcatatagtgttggcgattatggtggtgcaccaccacaaatttaatgtaaatgtatttaaaaaccctccaaatggagggtttttaaatggcttatctgcctgttcaatacgcatagagagtacatattatacttatttactatgttataagatttttcatttccactctgtaacaagattctagcattctctcctagaatctcaacttaaatcttaaatccaccaattaactcttgaagttcttccgccatctgtgctaattgtattgctgaagaatttatctcttccatagaagcatgttgttcctcagatgaaccagctatcgtttgcatacttgaagaattttcttttacagccatagctatttgatcaatcgatgtatcgactttcattgcatcagtagtcattgtattagatagttccaccataccatgcacttttgacacaatatcatttgcagattttgaaatctcataaaaactttgttttgtatcgttagcaactttaattcccgactgtacttctacgcctacttcattcatagcttttacagtctcatatacgtctgcttgtatttccttaattaaacttccaatttccattgaagattcggatgattgctccgccaactttctaacttcatcggcaacaattgcaaatcctctcccctgttccccagctctagctgcttcaatcgctgcatttaatgctaataaatttgtttgttccgcaatattttgaatcgcttctaatatactgccaatttgctgtgatttcttatctaataattttatgacattatcggattgagaaacagagtgatggatagactgcatttgtgttacagtttgttctactaattgttcaccttcattggctttttgtttagtgtatatggatgaagccgatacttcagaagcattctcagctacgtattgaatatttcgtgttacctcaccaattaattcagctccagactcaacttcattattttgaacctctgcactgttcgagatttcttccatctcttttgtaatttgttctgtcgcaacacttgcttgctctacactagcagttagttcctcagaagacgcagctacatgtcctgcagatgtgttaatttgagaaataatattacgtaacgactctgccattgtattgaaactaccacctaattgaccaagttcatcctttgaacgaatatctattttctcggttaaatctccttgactaattctttgagctgaaatgactaattgtcttagtggagtaattatagatttgagtatgaatagaattacaattccacctaacaataatgaagcacctattatagtgagcgttttataaaaaataggattggtagcttcttcaatttctttcgtaggcattacgccagctattttccaacctgtttttttatttgtcttaaagcttatgtttcgatcttcaccattgaggctataagtaattactccatcttctgtcttgtacaattcatccactaaagttttatctaatttctctccaggttttagtgatggatgaacaactatagttttatcttgactaactatagatacaaatccttgcttcccaatttttatcattttggatgtttttacgatatctttaatattcaaatctacgccaatgacaccacttttatctgcattctgctttgcaattgcaattaccatatttcctgtagactttgatttatatggagatgaaacaataatctctccatctgcttttactgcatccttataccaactgctttctagcggattaaacccttctggtatttttccaacaggtgcatgaataaattgattgttactggatgccgtataaatcgtttctatctctggatgtaactgtatatattgatcaaatttattctgtacattttgcgattgttcaggattataatccccttgtgtgagtacctttgcaaaatgagtgatatctgtatgcttattttctaattcatcatcaacaatcttatctaaaatacttatattatcttttgctgattgtagaattgtttcattaagatctgtttttgctttattataagatgatactcctacgataaggcttggtataattaatattgctataaatgccatagacaacttcgttttaagctttattttccccaatctttcttttatattaaacactagctacttctccttttcatttttactacttatatagtttatttaaatttttctcctttacttttccacattcatttatggtaccattcgaaatgaaaccacaattacatcctattatccgtactttataatttagagatttaattttcacagacagagttttatctgccctcctttcgaatatgttatttttctagattcagcaattattagactacgaattattccaaataaacttgatgcaacatatacttcatttaaaaaataattattggatttgtttggataaaaatctagtttagcgctaatccaatcggatgaaattcttaccataatacattcactaaacataaataagtaaatttatttcttttaatacttatatttaactgccttttaaccattctaactgtattatttcatcgttttatctatttattacaaccacttttgtattattgaatcactaaactataaattctaaataggagaataaaataaattagagaattacattgtaacacatatatataagttgttaatattaaaatttaaaactttactatttttcatatgcaatattacatgcgaaaagccataatttttttgttatactatgcatgtggatttttcatccaaaatccacccaaacgcatatttatgtatatgccaccctaattgatgaaagtgagaagagtgtttatcatttttctcacttttttatttaggctctgttaatattgattattgataaaaagtattaaataagggaagacaccttagagttggtgcttcccttatttgttgattattcaaatctaaaataggtattttctaaacctattctttgctttaatgttctgcccaaagcataattatttggtaattctttttcaatgacacaaataatataacctgcttttcctgttgttaaattagttagttgtaagtagttagtgttgtcgtagatataagaaataatatattcatagaaattattttctttatcttctctattcataccaacattgtacaccctaactcttgctcctacccaaatttcctcatcatcatcaacattacttaaaggcatccatttcgagttatccaatatttcacccttttcttaattcattcgtttatacacgaatgttgctagacacaaactatcataagcatccgtcatttcattgattagacgaccaccgacagagaaaaaagactcaacatagctttttacccattgaaacacttgctcttttagttatttttacattttgaatctacgaaaatgaattcccttataaaaactctaacagagaatcttccttccaaatttcacctagggaattatttgttttccaaaaaacctaccaacatctttatcaactcattttagaatatttaaacaataattccatatacattacctgcataaattattcattttcttttatataagacctacctttttacttttgatagattattagacattggattattatacataaatcccaaaaacatgcggtattttgtagaattttgtctatcaatatgtatgtacacccttttgtagtggatatagactgtgaggtgtaaggagataccttacaaaataataaaaaggagattatagaatgagtagattaacaaaattctcaaagttagtatttgcaactttaatcgcgggaagtagtctaagcacctttgtttcgtcacacagtgtacaagctgacaccttagatcctaattaccaagacaatataaaattcataccaccttctagtgctaggccaaaattggaacaaaaaaacactattgttccagaagcaaaagttgttaaaaaccattatgtaaagtactctaaagcacatttccaaactaaagaaagtataccaaaagagatttattattcttcagaaggctttaagggctatatacaggcaagtaccgtttgggatatgggagatcatttcgcaacactatattccggaaccgttattcgatgttagacttttaatccattctcccctaatgcttaaaatggttaataactcactgccaatactgtaatatctattgttcataaaataaaccacaaaatctttcgatttcatggtttatcaaatataaagataatgctaaacgaatactctaacattaccttccccaaagttaattatagagtattttcaaaaaaaagacactcttgtagtgtcttttttatagtattttaaaaagaattccacctactaacacctttttgttgcgcctattcgtttatttcaatataatacttttccatctcgtatatgcaatagacaatgatagctaaactccaactgacaccataataattatgtgtgtagaagtcatatcccgccttaatacctttctctattacaacaaatgtaaatcctaaagccacccatttgttaattttcatcttaataaacgttaaagagataattattaaaaataaaatatttgtaagatgatttatcattagctcatatttttgaatgtatactgccattatacaagcaacgatattagtcgcaatgccaaaggcaatcaccgctccccaaaccctgtccgaaagtcccactcctgagtcagtcccttcctaaacaaatatccctttctttaattcgttcctacaccctattcaagatatgctaaattatccttgtctgatgaatatctatttatcttttcatatagagcaaacaaaatttctacttataattttttctttattagacaaactatgtctaagccgtttgaactagcggcttcactcttctggtaatgagatagcacaatttattgaattgactaactcattcaacccactggcaccggcaggcaacaaaatagttgtctgccattttcatgtatactttttctaatttcattacaaaccaaatgtgtgctgtactgatttcaaaaggacagcatttcattttttaaaatgtaaaaaagataagatcctgtctacttttggtataggactttttcttttcacacatactatttttgaacctgtttaccgatacgtgtcctaatggtgtcttgaattcctcctaaaaagggctgcagatacgactgcatgcccttttatttacgttgctgctctatattgagtaaaataattaaaaactaaaaatgtaatattacatattttttctgttcagattatgttaagattcacttcatagtcgaattatggtttcgtatctaattcagcaatatgtgaactgtttacctaaagaaaagacacccaaaaggtgtcttttcttcttttaatctaaaaaacatttctcctatttagtaagatccaattagccctctaacctaagcctcatatttaaaggcaatttaatcatacactcaagagttttcatctatttcaatatacttataacttaatttccaatcacatttccagcactatatttgctttcttacagaatttctgtcttgttcttaattctgtcaaaatcctcatgtagctatacaaagaatatatgctactatgatattaagaaactatgcgttcccttaaccctgtatccggccctgtatttattacagggtctttgtttattttattggcttataaaggttaatacacaaccaatttcaattaaaaccgtttaaatgttagttagaatttgaaaaaatatatctattaacttttttaacaaatgtaatctaatattaaatttctaaatctatactgtactatacaccagttaacactatataaatagtattaactatcttaattgaatattagcaataataagtataaacattatcaatttactatatcttacatttatgtaaaaatagatgtatgttaagcttattcaaaatctttcccctaataaagatttgaagtagcatttcatgattctccttactgttaatatgccttgaaaaagaaccctatagggttctttttcttttcattataacctcagtaagtccttatttaacatgcaaaaaggactgctaattatttgcagcccttttacacgttaatatacacttgtattacatgctgaaaactttattatattaggtatttataccaactaaacatgccattatcatttagatatataacacttcaaagtttagaagtatacaataacaaatctttcccagcttccagctacataactagtaactgttaattctctaccaccatttgctgatatatatctaccattacttagtgcttgtaatacatatatcctattgtctccaccattatataagataaatttttcccatgccccaattgatgtacgatctgctactactctaccgtttggctcaaacgaaacgtactttccattactttttgcttttaaagcaaacgtatataattccccagtcggaattaattcaaatttctcccattcattaactgcattacgatttgctactacattacccgatggctcagcagaaacatattgtaaatttgctgcctgtatagcaactgtccaacttccattaaataaattcacgccttttagtgaacctgctcttgatagatttgctgccgatacatcattcgatggtgtaatcatcaatatcattaaaaccatcggcaacatcattaaaactaacttttttgagattgtattaccacttgcacgtgttatgaacctcttcattcccattcctcccttaatatgcatagaactcatatacatcataccaaatatgtaaaatattgtaacggaagaggggttttatcaataaataccttactattctgtttcttttttctcaaatctatagcacttaaacatttatcaattctcaagcacatttttaaaatcccccctgataaacaaatatagcagttgatagcaaggagagtatatacaaaagagagagtattttcatttcacttttctttaaataaaaaccaaatagccgttcataatgaacgactatttgcatctaacgaataattagaaggttcttcatgttaatctattttgtttaatcccgttgaagtaacttgataggttctttttttgcctatatattcttgtttattattctcaaggttaagaagtgtagcacgtgtcttttcctttactgcttccccttctatatgggtaaactcaatgtaatcccccgcttttaaggacaccgtttggatttcagcagtttgttgtctgtttcccactatttccttattatacacaacattaccggttgaattctttactgtaatacttgcatatgtctgattaaagtaagaatgtggtacgcctgcttctaaattcacctgcattttctctgttgtcctattataatcaacttttgcgatttctctatcactatatccttttaaagaccacctaaaatgatttccatctaaaaccgttgtttctggcattttttctactttcttcaagccttcttttgtaacttcgtacatgactttttttccaaaactttcttgtttactgctgtctacatttattaaagtagctctatgcacaccttctaggtgtgtcaactcaatataatctcctactttaactggaactttttgcgattcagcattttgttgtttgtttccataaatgtctttattgtatactactttccctgttgcattttgtactttaatactcgcatatgtctgattaaaataatgatgcggtacgcctgcttttaagtcgatttgcatttcttctgtcgacttattgaaattaatttttgcaaactcgaaatcactaattccttttagtgaccatgcaaactggtttccttctaaaatactagaagagttcgggatatctgaattaaaacctaagttatctaatatagattttagatcaggtaaaacacctattctatcattccacggatcttgagattttgttcctgtattcggattacttaagatatttcttaattcggctggtgtataaggagaacctcgatgttctttagcaataccttgaatcgaagttgctgctccagcaataattggtgaagcacttgatgttccactaaatgttgatgtatataaatttgtagtattttgacttggatttgctgatgttgtatcaacattttctccccatccatatacatctaatcgacttccataatttgaaaaccataaacgttgatgtggaacagttgatgatcccgccccaaccataatagcacctgaatccttgaagtctggactatttcgatttaaaatcttttttccattacgatctttaaaattatctaagtcgtttgaaccatttgcgccagcttctataataataatccctttatctgtaccaacacgaattgcatcaaaaatatctggatgtacttctacaggtaaatatttatccccatacccatcatacgaagcttgtgcctctaataaaagaatatctcccgcttgtaaattatgtacagcacttaaaatagcatccgctgtattataaattccattatccctaatctgggatattacttttacatttgcttttggtgcaattccaatatttccaatttgattatcttcagatgaaacaattcctaatacagaagtaccatgagctctatgctggcttatattttgtcccgacataagcttaatatttttattgactaaatcctcatggttcaataaccatccatattccatatccacaaaagttgtatccttcccatcaccacctttaatgctccaagcatgcgaggcattaattccctttggtgccgcttcaagatatccttgatttttaaatctagggtcatcgtacggattaacagataaatttggtaactgtatttcaggaggggtcaaaatttgtttttcttgtatataagcctcctctacgagaggagatgtttcaaattttttcagtaataattctatttctatgttattaggagcttgtacaatataataatttaataaattattagctgattcattagcaactgatttagattgtactgataacttttcaatctctatcggatttacagatgagaacagacgattcaaagtaagttttgtattttcggaaaataactgctttaaattgttatcataatccccattttttattcgtttctcaataccatcttcataaggtaagtcaatttgatttttaaactttacaattaatctttcttcctgtgaatctctttctttgtatgtgacattattagattcagcgtaaactttattatgaatactatcattttgtaggattaaatctgttcctacaaatgtggtcattgcaattgatgaaattagaaaccctttgaatatgttcatactatacccgccaatctatattctcttgagaattttttaatgcgtataatggttaagatttttatataatatatatatctataatttaacttttgtagtgaaatctatgactttattaataatcccatagaggtaacctgatatattcttttctttcccatatactcctgtttactattctcaagattagtaagtgtggcgcgtgtcttttccgtttgtgcttctccctctatatgagtaaactcaatacaatctcctactttgactgaaacggtttggctctcagcatcttgttgtctatttcctataatttctttattgtacaaaatattaccggataaattctggactttaatgcttgcatacgtattagtaaaataaggatggggtatacccgcttctaatttaagctgcattttttctgttgctttgttatattctattttcgcgatttctcgattattatatccctttaaagaccacctaaaatgatttccatctaaaaccgttgtttctggcattttttctactttcttcaagccttcttttgtaacttgatatcttgctgtttttccaatggtttcatttttgttattttcaaggttaattaaagttgctcgcgttttttcctttgttgcttctccttctatatgggtaaattcaatgtaatcccctaccttgacgggcacagtttggctttcagcattttgttgtttatttcccacgatttccttattgtacagaacgttaccagaagaattctggaccttaatactagcatacgtactagcaaaataggaatgtggtacacctgcttctagttttaccttcatctcttctaccgttttatcataatctacttttgcaatttctctatcactatatccttttaatgaccatgcaaacttgtttccttctaaaattgttgcttctggcattttttctattttcttcaggccttcctttgtaacttcgtatagggctttttttccaaagctctcttgtttactattatctacatttgtaagagtagctctatgtacaccttctagatgtgttaactctatataatcgcctactttgactggaactttctgcgattcagcattttgctgtttgtttccataaatctctttgttatagaccactttacctgatgtgttttgcactttaatacttgcatatgtactatcaaagtagtcatgtggtacacctgcttttagatcaatttgcatttcttctgttgatttatttaaatttactttcgcaaattcaaaatctccaatccctttcagcgaccatgcaaattcattaccttcaaaaatgtttggagattcatttttgatttgtacctttttctcaacagtttgatcaaatatatccgttaatacaatttttgcataagcatttgttggtaatgatatagattgactgattccattttgataagatttaatatcattaattacgttaataggttggcccgtcatattttcattgttataaatttcaattttccccttaaattgcggtgtactattttcttttagtttccaagatacatttaatttttcattttcataatatatagattggatatcaaaatctaattttcctatttcaggttgagtaggttgatttagcgtgaatatttttcctgccccaatagtagactgcgtattacctcctgctttgacccatacatattctgaagtagatcctccatcatattgataagtattatcatgcgttccagaaatactttgattattccaagaactccattgtttatcaactaattttcggctataaccatttttcaagcgcgcttctcgaacattctgtccactatcagcccagtcttcttgaaacattcctaaaccatgattaaatgcaacattagcaaccggaaagtccataattgcaatttgatgccatttattctttgttacatctttcatccattgtccaaatttagtatgaccattttcttgccatgaacgcattgtcattgtgtaccaattgtagtctttccaaccataagttgtttgaaccttcattcctgttccttctcctccaaagggtccagcttgcgaattcggagataagtattcggcctttattgcttctttagaggaaattggatcccataaggcaaaatgtaaagtacgttttccattttcatcaaacccactttgttgttgaaaaccagcatatcctccagcttcaccacctgcattccagttgtgtacagcccagtacgtataaggtggtgtctgaactggtgaccagtctatactaataatatctgaggcaggtatattttggggactcacataaactgctggagcagctgaatgtgttgcagctttagtgtgcaaaatagacgttccaaacatagaaaacatgctacatgctgcggtaattataataactttattaaatctttgctttgttttctgactaatcactaatctacatccttttctaatttttattattgaatactaacgtagtagagaaatctatcaaaattcaaacaacatccagtaattctttaaaatactggatgttgttctatctttacatctgattcttacatattaattgattgtaattgctttccataacgatagtgcaaatatccaattcgggtcaccatttccttgatgattttgaacagcttcatacactgtcccttgatgttctactttatccccctttgtatatgccttctttggatcccatttttcataagatacattttgatctttggtttttacaagaagaatttcactttggattgatgtatttccagctgcatctacagccttcactgcatatttatattccttattaactgttaagttttgatcagtaaacgtcgttccttgtaccgtttgaatcaattgtccatcgcgtaatacctgatattcttttacacctacattatctgtagaaggattccattttagctctacactgttagaagtaaggttgcttgcatataatccttgtggctgtgtgggagcttctgtatctggtttcggattaacaatttgatttactttcttcagaccttcctttgtaacttcgtacatggctttttttccaaagctctcttgtttactattatctacatttgtgagagtagctctatgcacaccttctagatgtgttaactcaatataatctcctactttgactgaaactttttgcgattcagcattttgttgtttatttccataaatgtctttattgtatactactttccctgatgcattttgtactttaatactcgcatatgtttcattaaaataatgatgcggtacgcctgcttttaagtctacttgcatttcttctgtcgatttattgaaattaattttagcaaactcgaaatcactaatccctttcagcgaccatgcaaactggtttccttctaaaatattatttacattaggcatatctggtttaattggattagaatccgtactcttccaaatctctgctgttaaaattggatatcctaatgcagctactttttgaatggtatcgttatttggacgtaatccccacttctcaaagaaaggaatcaaattttgtttggctacttttgatgctgaaatcataaataattgttttttattatcatcagtttgtggaagttcacctgaaggcatgtctctatacaattgatgcaatttaggatagaaatcctctccatacgctaactgtagttgccaaagcataacaagctttacaaaaacatcgctaatttcatcataatttttattcacttgttctagatattgaaatgcttttggataaattccacttttctctaagttggatggttgattaaatgctttttctacagaaaggctgtatatattattttgtacttctgtcatattataaaacttccagggcgattgttgtctcaaatgtcctgcctcatgccaagggccccaaccatctgttataaatttattaatatctaacacgtattggattgcatctcctacatatgctgttcgataagaagttgcatacatataataatcgggagaatgattttcttctacgtaatgaacataatgtttatctacttgttcttcggataatccagctactttgtcttgaattcgagtagcttcatccatcttttttaagagttgtacaggatctgtattagaacccaacaaatatttcttaacacgtgcaaggctggccgtaattaatacacgttctccttttaactccactgcatgtgcattaggatattggtccagcatgtttattaaatcttgtttcgtatgctttcctagttcaaagaaaggcgtagtcgttccacctgttgtgattgttgttcgaatggtacccccttgttgtttattataaaaataaatcatccccccacttggagattggattgtgtttataccaggttttaatgtaaatgattttatcttagaatcttctctccaagaagcatcatacgaataagttccaatatatacctgaatatcttgattaccttctacattaatcgttatttgttcatttggctttgcatataaaccagttggttcatatggactaaatgccatactttttctttcctgttgtttcagtacctcaacatccccttttcctgggactgtaaatgttctattttctgatttaactgacttttctttttgcaatgatgtcgataaatttttttgctgctccttttgctccgcaaagacatccgatgaaaaaatcattccagtcgcaagcatagttactgtagcagtggccgcaagtatttttctagttttatgttttgaattattccccatattatctccctcatttttccttagtactcttaagtttttttgttttcttctccatgtttttacaatctaaactattcatactatttaaattgtgtctattactctatattttttcataaatatctccttttctttatgtattattgtatataaatgttatttgatgacacattaaataacaactttacgataaactcatcgataacagcctattatgttttgattctgtattctaaacttccatccaattagagaaatatatccaattggagaaataagtaaataaattacaacatttaaaggttgggatctcacgaaaaattcataaattttttttactttaaaggtttaaacaattgtgaccacatttgtttgaacctccacaatttttttctaagctattctctaaaaatcttatttttcgttgtaaataaacctgattggtactctttatgcaaaagaaaagatggaatctttaattcaactccatcttttttcgaaataaaaagcatctaattctatttgaattagatgcttacatttagtccttaagcctaatattctaaactatttacgcgtttgtaaatctttttttattacatcccagagtgaattatcttgacgcatcggtttaccctcttcatcccattttattttttctgttcccaattcataattcatccctgtccatgtgtcttcacggaatgcatagaatgatttatgccatcctttttggttaaagatagaaataagatcttgcatgtattgggtagcacctggaacagtacggttaattccaaactcctctgcaataattcgattagatggtacatgatttttcttagaccattgttgaattggcttcaaaaatttctctaatccctgcttattccacattacaggtttctctaagtctcctacttttactaatcctggatattgatattctttatttttcttttcaccttgactcgttaattcatatggttcatacatatgaaatgcgtaaagcgtttttttatcctttactggctttaagtatttaaaggcccatggagtagcatataaacctgaatctaaaataaccggtgtttcttggtctacttcacgaatggagttaatcaccttttcataaaatctgtttaaatccgctgtcgttccctccacttttgcataccatttctcgtaatcttccgtccaaaaatcattatatctattatttttagctgtttctggatgtggttcatttataatattataaccaaccaccgcggggtgatcttttagttccagagcgaggtccttccaaaattgacttgcttgttcttgatacttctcttcttcccatattctgtcgtcattcttattattattaaattggcgccatcgatcaccaggtaaggataacattgtaagaacgactttcattccttgtgattgtgcggcatctaaatccgcctttaatttttctagatcttcctttactaatccccgatagttatctgcattacctatcagaaaatcctttccagaagtatctggtttatcctcaaatagaaaatctttatcttttacccatttatcaggtgctaaacgtacatattcaatattagcttcttttgcacttttatagttttcaggtaatgacgtactattcatgaaattagtaccctttcttttcgaatcccaaaaactaatttttgaatcgcccttgtggtatgtatcagctcttacattcatttcctgtactccaaaactcatcatgcctaataacgcaacaattggcaaaacttttttcacaacttttccttctttctctttatatttaacacacataacatacctttgttttgttacaggaatatggcaattttccaaaaataccttttaaatttatacattggtagttcattcataaaaaaagaaagagataattagaacgttgcttcattttaaaagaaacaaaaaaggaatcctttacggattcctttttgcaatgcactctttttcaaatggtacattttgcacctacttttagtataacttataattcctataaaataaataagattaactgaaatttacttcaaattgtgataaaaaacataattaagaagcgcagataactaaatatcatccctttattaaataaaaaagattaaataattccccctccaaactaggacccctttacactttttacaaatattgttataattagataaactaaagcattatcccattaacaaagggactccataattggagtccttttgttaattagctattaaaaatgatagcatgtgattattgtataatttcttccttttttagatctgcatattcttctacgaaatcccataaaccttgcttttcgaagtaagaaatacttttttcacttcttctaagagtttaattgcttcatcttcattaagagaacgtaaaatattgaaatgatatacatactcttcatttcctaattccatacaaactgctaatcctttttcaataagttcttttacaatatttgtttttcttagcttatagtgttcacgcgcttgtaagaacactgctttaaaatgggcaatattcttctctgtgacttctgataaatgacgaattgctaatttagataaattttgagttgcatataatagtcctagattatgccttactattaaaatcaatttttcttcattatgtttttgcaaaaggtcaatggaacgattgaaatgttcttccgctttttcaaattgctttaagaatatacgagctgtccctaatgcggtttcacaagaagcaactttcacctcatatcccattagccctaaatacaaggaatatagatacttattttactttcaaaggctgaaaccttgctgcataactactgaaaataaagtgaaaagacgttcaaatccatatggatagatcgtcttttcactttatttcatacatatactgatttttcacttattcattttgtattgtacttaaaaaaccaataaattcatcttcatttacaggtttactgtagtaatagccctgaattagataacatgcattacgttgtaacactgttaattgttccttcgtttctaccccttctgctatcactttcatgtttaaagtatgagcaagtgaaataatggtttgtataatttcatctccatcagtagaagttccaatcctattaacaaattctcttggaattttcaaagtatcaattggataaagaggcagatacgctaatgaagaataacctgtaccaaaatcgtcaattgataaatgtacaccatatgattttaatgcttttaacttcgataaggtttccttttcatctaccattgctattcgctctgttaattccaaatcaatcgaattagcaggtactcctatctcttctatggtagatataatggtttgaacaaaatctttctgttcaaactctatagctgataaatttatccccatctttagatttgaaaagcccgcagaatgccattctttcagttgttgacacgctttctgtaacgtccacttcccaattgaaataatctgcgccgtttcttctgcgataggtataaactcaaaaggagaaatcagtccaagctctggatgttgccaacgtattaaagcctctgcaccaataaccttacctgccttactatcaatttgtggttgatacaataaaaacaactcattattttcaattgcatttggtaaatcctgttctaatcgtaatcgacgagttactttttgagataatgtctcgtcatacatacaaacagcattgttacctttttcctttgcgctatacatagcgatatcagcgtgttgtaaaagtgtagtagtatttattcctccaaatggatacactgctattcctatactaagagataagtaaaaactatgctgatttactacaaatggttcttcagttatacgaaatagagttttacacaaatccaatagctgttgctctgtttggttatggacaatgatcgcaaactcatcaccacctattcttgctagaggaatagtcggtgacagacatgtcctaaaacgtttggcaacttcttttaaaaccttgtcaccaatcgaatgacccaatgtatcattaatagtcttaaagcgatttaaatcaatatacaggagcccaaacttatcctgtgttttttgtgcacgcttaatagatctatctaattcttgttggaagaatatacgatttccaatctccgtcaccgtatcatggaatgcaaggtaatttatctcttcctgttgttgtttcatccttgttatgtcttttaccattacatagctcccaaaggtttgtccttctatcataataggaactatagtgacataccaaaagagtatatctttctcattgttatttttcacacgtaactgtagtgaagatgaactacatcgtttccctttctttatagctgcttccaattcagatttatcttcatctaaaaaaatagagaagcactctttccctatcaatacagcactttcttttcctaataacatacttccagcctggtttatatttaatacgataccgtttgaatcaatcgttaaaataggatccggatgatactcatataatgacttaaatctctcttgattttttactaaatcattagatttatttattaaatcccttgttctttgagatactgtttgttctaattgattattaaacacttttaatgttttagttaactctttgttttgcattcgtacgattgtatgacgaatcagtacaaatacaaaagcaatacaatttcccgtaattaatgtagctgaagaagtttgctctttcaaagtaaagccaattaagactgcaactgcaagataagggaatataccaagaagtttctctccaaatgtcggattaataataaaataatttcttttaaaagaagtattctttgggattgtagcacatgcccatcaacttaagaatttgcactacccccaagtgtcaaaaaacgttattcgattttgtacatgcttaaacaagcgaaaatgtacatgtttatcttgacatttacactatttcttttactaacttttttttaccgaaaatatcatctaagaaacccattattccctctcctttccttttaaatgcagtatctttttataaaataattcactataatatcctatttatcatacactaaccaggaaaatatatccttattagaagaccaattctttattataaagaaaagatcaatctttaaaatcaatgtccaaaacaattgataataaagtttaaactattcctaatttactaacgcttaatttatactgaatcagattcattactcctctattaaacttataaaagctataaatatttacatgctttcattaatttttattttgaaatctaatgttttatttgtttgacctgtttctaaaatatctaagacatctcgtttgaatatcagttttaggtttttaattataaataaagaattaatttttataaattcaaattctacatttaattattaagcatgtaacataccaagataatatcttctattcatgaatatcttcctattatttattttaggctttattgtttttatacattttgtgttcactttttagaagtttttcacttcaaaagaacaattctacaaaaacttcatttagtcatttcattttaattttattgagtcaaaactattaagaattttgtgtctataactgtccacaacaagaaactctatttcgcttcatccacataaaaacatgatactatatcagaaaactttattattttcttgaatcgaagagactacattataaataaacagtgttattatgtcttgctttttacattcattttccaattaataccacatgaaattaataacacaaaatttcttatattgataattaccaaaaaccgctaccggttaaatataataattgttataatatattatattgataaaaagttaaaggagtgaaaaagtggtatgtttagcgaattatctattgaaaccataagtaaattttccccagtcatcgtggcacttctaggtgcaattacagctgctttcatatacattattaatcaatttattaatgtaataaccacaagcccgcttgataattattttaaagataaatctaatcaatttaaactgaaattttggttttataccatcggtatacttatgggaaccattgtgtattttatttatggcattcttctttatccagctttacatgaatatcgtaattctagcttattcattttaaatgcactaatatgtttctctttatttatatatttttctatcacactcataccaataaaattatttaaaagaattattaaaaccaaatggcatttcaatttatttatttttcatgtattaactagtatattatttttctcctcagcttcatggggatatattgtaaatgaaaagtatttagatttcttatggaatatgccacttgttgcttttctattcagcttattttatttctttacacttcacaaaattactacagctaaagctaccaaatatgaatatgatatttgtcccattactgaggaaacatttagagagatagataacttaaaatacgactatcagatggatgagaatagattagtcttctacaatgaattagaatcaagcgaaaaaatattttacgtatatgattcttcttcgaaactttatatggagtgtaaaaaattagttaaaacagagataacgtctgaacccaaaaaagtccctaagaatcgcaggactaaaatcacaattaatatagaaaaaaactctatatgactaaagaaagccgcaattttagaatcgcggctttcttatttctaattgtctattataataaaagaaatatttatactactatcggcatatattcctaccatattttatatcatcacaaaccattatttaaaattccaatttcttatttttcttcaccaataatacagtccacagtagaatgggtattgtatcaatttttgattttatcaaacttccacttcaataattccttcgaaggccactctttttgctgtattggcaatctaattttttctctgtttatactagagtcttcataattaagaagaatagttccatcttcacagattttcaagtctccacggtcaaatgctatttcatgattcgtacataaacaaatgccattttcaatgacttcctctcctccttttgcagcatctttaatatgagctgcacgtaaaaaaataggattagattggccacaaaccgcacattgattctcatacgcagctaatacttttttacgaaaagctttctgattccccctataaactttcttatatttcgtttcgatccattcttttccattgtaaggcatttttttacgaatttcagattctgtaggaaatttaatgtcaccattttgatcatatacagctattggaatcgttgaaaaacgatccattgacatatctaataaagcaaaaccaatttctggtcccaaataaactcgagttctaacttcatcaacaacattatgtatcatcaggtactcaatagggaaattatatccatcagggcaagaagctaagattgatggctcaatatattggtttcttttttctcttttcgctgcattattgaactctattaagagtctttttggtaaaaattttatacctcgtttcatatttctcctccttattaacttgcagtttagattggcacaacatactattgaaaatgattctaactaagttgtttttcggtagtggaaaaaatcaacaatctattctaaagaaaataaaaaactaattttcacttaataagtataagttcacttatttttatatcctaaaatccaatatcgtaatattgtttaggcatccatccagaacctttaatagacgatgcataatcaaaaattgttttaaaaaaacccgcactcaccttactatattacccttttttcatgataattgtttccttaagaggatggttactttcaattagatattcattccgtttatttagccgctctaacagagcttcatgcggtgctctaataaatttaccattatgttcgtccctattacatttttgacaagttaatactagattccatacaccattcaaatccatgtcttcagttgataaatattgcacagagagcgatataaaacgggtgatgtattatcgggaatattataacaatatcttcagaagctaattacaacaatctatgtttaaataatatattcagtttaaaacattttatattttgattgattaacccgtccaatcttacatgatataaaaattttaaactattaactacgttatgtttgttgtaaaaccattagtattacttatccattagaacaattgtttaaaaatataaactttctctttgactaatataatcgaaaaatttaatatttatatataaatatatacaggaggaattattttgagaaaaagattacatcgcaaacgtttaacattactttctaagacaaggaaatttgatcgttcgccttcaagagtagaagaaagtaaggattcatctatatttttgacccaagctgccattatagtgctattgttaacttttttatcttattcatttgccgctctttttaaaggtggatatcatcagtattttcacttaaattcgctagcctttcttaagtgtgacacaaatgacttaatacatttctttttaggtattttctcatacatagctggagctttattttggtattttgttattcttttcagctgggttttaccattcaaattcacactaccttcaaaggcattatacaaccaaatacattctacaatcattatattaatagctatgtatatttcgctttcattaatatttgacttacaaaaccattggggtacacaatttttattttttggttctttaatgatctttgctttctatggtcttttacctaaaaagattcaaaatgtactaaggcatatcgctacgcctttacattcttataaatatttaacacttattaccctattcatattttttggactctcagcccaccaattaggaataaaaactgcaaaagagcaaaaaatttatttaacatttaccaaagacaatatgaattacgtggtgattagtaataacgataataatttaatatcagctcctcttaacccagattctactattcgcccttattttaaagtatattcccaaaccgagaatatactttttaaaagcgtcatatttcctaatggaataaaagttgaaacacccgcaaaaatgaagtagtttaaagaggttccaaattctattctaagaaagaatttggaacctttttaaataatttaatagagattgaatattttttaatccatctaaaaattaccaatataaatgtgatcaagtacttcatttttatttaaataaactttcgttactgaataataagaaatattcaactcacaaatagaaaataactttaattaatactgtccaattgatggagataagaccattcacaacttttttaaaatatataggaatattaatttaaataaaccctattataaataaattcaaaataacccctttacctatttttatgttcctatctttcaaattgaagatctaattgttcttttatgaaatcattatattcttttatttccactaataaactttctattttcattatttgttcattattaccaaactttttaattagttttactcccatggatatatattttggcagctctaccatataactattcttcatacttgaaacgtggaaaccctcaatagcactaaaaatatattcaaataaattgtttttacctaatagaaacagtccaatatttccagctccatttttttcaatatattgtccccactctacttctgtcttaggagaatgatactgatcaaaatattcttgtaatattttatcacttaaatattgagtagatgcaacaaatacatgaattaaaatttccttgtcttttactattttttcactgtttatatcactaaaataataatttaaaaattcttcaaaatcttcttttgtatcaatccaatttttaactttcttttttatgccttcttgatcactaaagtctttccatttagaaaaaacttctttagcatcaatttcatcaaacactttaaaataactaacttcagaaattttttcatatgcatttttaattgctaactttaaaattttcaaattataattattatgtaaataattataaatctttaacatgaatagaatattggaattttcccaatactctacaggaatttcgcgccctttcgaatatattttttttgctatcaactgcgctaagtaaattatactttctttggcgtttctattcccacttatattatgtaattcttggtatgatttcaaaagaagtgtaaatattttttctatacactcatctacctccgacaatctatgttccaacttctcatttacttctttagcactatattcttttattaaatctaaatatattgtttgtatttcagttagatctttttctttaatcaaactaatgaaattacttaattcattttgagaaatagcatctctagggctactatacataaaataatggttaaaatacttgtctgagcaaaccctcttttccttttcccattcttttttatttgccatttctccttcaaatgcacctccaaatagacgtgttgcataagggaaaattgtgcatagtatcccctgatattcatttaatctgggtaacgctttaaattcatcgtctaattcaaacttgtaattatttataaacaataatttattagtatatatatattgatacaattccggtgaactaacttgaattaagattaaatacagtaaatccttaacgttcacttcttcttttaaaaatggtaaataaaacttcaccaaattaaagtatctagataggtctcttaatgacaatttttgctctattaagctatctataatttcagtatattcctcatttaaaatattattttcctcaataatgttatttaattgttttttgcataagttatataaatcaataaaatctggcttcggtaaataaataggtatttgtataaatttctctatatatttttttgcatcttctaaattccctttttcttcaaattgataaactgatgataaagatttttggacaacttcctcatctaaagctaatatataagttacctttggaaaatcagctaccaaacgtactagcttaaaaatcattctaatttctgacccctctagtcgatcaatatcatcaatatatacgactattctttttggataatctttaagcaacatttcaatttccttttttaaatcagataaactatccgtactctgacctggtttaaatctatctactagttccttaaatgagagtgtcgctccaaaaccacgcaaactaacagaggataagatatcagcatacttttttatcgctttaccaatttcaggattatatccttcaacttttttgattccttccaaaaactccaataagtaaagccgaataatatcatgattattttcaccaaaataccatggtttaaactctataaatattacatgattcttatcacttttctctttaattaaattatatactgaacttttaccacttccccaattacccaaaatccccatcgttaagctgtcttctccacttttaactaatgaattagctattttttctgcaaaagacgctctatttaaagcatcctgctctgtatcatttatcggatattcagagttgtaataggcttctattttgttttctttttgaagacttttggctattttctctttcttctcttgtttagatttttgtattcgcgctaaaatttcaccagtaaaatataaaattatgcaacatgaaaaaaccatgcttatatcgaacaaatctgaaagaacatttcctgtccacatgctaacaggtgtgtttacaaaccaataatttattattatgctcaatgatacggtgaatataatataatcagatagcctaaaaaatgtttctcttctgattctagcattagaaatactagtaataatatatgaaacaaaaaatagtattaatggtatggtaataagaacatataatactccctttacccaaaaacttaagtaatctgacggaattttatcatgcatttcatttctcaatattgtcaaaaaaatatttatacatataaatgataaaattacactggatactctccaactatttttaattattttttttgtattactttcttcttccattataaaagctcctcttttatatgcttaccaagtagtttttcttatttccttggattcctctctcccttgtttttataaaatacatagggtaataattaagtgtttataataagagacatacaatcactaataaagtattttattatttattaagtactcctcatgcaaaaaccaaaggggaatttcaccataggtattatacaacacttgtattctatactttttaacaccttcaacatttcattacaaataaaaccaagaattaaaaattctttaatatatctcagaataaatctttctgtttaattaaatatttactatttcaattaccccaaaaagaaggaaatctaattgaggtaatttacaatatttaagtttaatataaagatgactagatgtttgttttatagccaaaattaaatttaaagtagtattaacatgtctaatttaaagtaaactgatatcagattattacaaacgatgtattccgaacaattattgtatccttttactaccaataatctcaaataaactatttcaattcagctaaataattgattgactcaagattaaaatttgcactaatactaccttgataaatttttagttgtggtgtatctgttttcaacccaaatactcgataaatataaaatgcctcagttttttcttctgaaaattgcacttcgctactcgagataggaaatggaatattcgcttcattaattgtaccttttacttcaatatacttctctttcccatcaatctcataagatagaatatcatatccaagaccatcaccttcaatttgagatatgcgatgtactttttccgccaaatgtgaaaatcccatattggtaaggctctctttttcgtattttaatactaattcttcagcagcgtcacctattctccctttaacatctgcttcagcgacataatctcgcttaacaccatatcgatttcgaatagatgatcctctctttattattttattagctgatatatcagaatctgtacttagctcaagttttttcccttctactactaaatcattatcagtaatttttatggaagtaattgagctttcatattggtcatttaaagaaacataaagtaaagcctgcattccttttacattcaaaataggtacttgtttatcataatgataaatatgttcgatattatttgtaagtgaaataggccttaaccctttaatgtgaaaatacgaatagattatcattggatttttagctgttatatgagtaacccctgctagatgtcgataatactcagggattaattttacaaattctggttgagcagcaccggcataatctctatcatatattcccacaagttcagcttcgtataataatttagctttacggctatagaagattactctggtggtcatattgttagctaattgttgttcaatgtcttgcttgtgcttcaatgagatacccgcttgatctcgacttgtaaattgcccccaaatcagttccccattattgtttaaaccagtaatttcatgttgtctgatcgtactaacaaccttaggaaatccttcattaacatcattgaatttaatgaataaatgtttaacaggtttttgaccatcgttttttttcattatttttcctcctcatctactttttgtataccaccttctatatcactcactatactctttttaaattcccaacgcaactcttttattaaaaaataaaaatctctttataaaaaataaatacagataaactaataaaacccaataaaataaacgtttttaataaaatctgttattttaaaaataacatttcccataaactataaaacaaaaatcctttaccgcaattatattcaaaacatcgtagaatctccttcttaaactaaaataaatgctaacagaatatcaaacgaatataagggaatttttatatctttaattcagttgaatttttaatatagataaaaatactcaaaaggggttgggattagtatagtagactcgttcattttaaatgtgaagacttatctaggtgtcaaagataaattacattcgctcttacaactggattttttgtgaaaaaaatatagatttgattatgattattttaaaaaataatattcctgagaaacataaggtaagtttattatcactgagaatatttggagaaccaaaggatagtctacacgaaaaccattacaaaccgtttcattcgtaataaaacagttatgagcgtatataaatctgcgcttataataaccattagatcttttaatttttcatatacgattttataaatccctcaattcaataaattcaaaatacttaaatctttttattcaatacgaatctgcaattcttctcaaataaaatagctgcaggatggatttccccttcatgtaaactttaaaaatcactttatttggaacgataacacaagcgagtacgaacttttcacatcatccccagaatataaattcattatttttattgatacaatatatagatcgtcagttttaactatatagttgagaaggaatgcctaaaaaaagaaggaggatcatgatgaaatatcaaaccttatttcccttattaaaaaaatctctttttatctttatcctttctttcagtatgttaattttcacactccctccctctaccattgcacaatccaataacaatgtaatttctgttacaaattactatgtatctccaacaggaaatgacctcaatcccggtacattagatcaaccttttgctaccattcaaaaggctgctaacgtcactaaagaagaaagtactatctacataagaggcggagtttataaccaaaaggttcgtgtcactcgttctggtgtctcaggcgcacccattacttttcaaaattaccaggatgaaaaagtcattctcgatgattctaaggtcaaattagaagatgatggattatttacaatagaagacaaaaattatattcaagtaaagggattagaccctatacatacaaagttagcagtagtcggtgatgtaaatagaagcggttcaatcgttctagccgcaactccacccttaaaagcattgggtgtaaagaagaatgtatggtttggtatttaagaatgtaaatcagactgtatttggtactatggaacattatcccttatatttttcattcctactgctacttatgttatttctaaattaatatgttcataattaaaaaagagggtgctcgcagctccctctttttttagataattaaatatgctctccatgatccataaacacttcaatagtttcattttgtgatacgtcttttacattagtaagaccaaaagtaaaaacagcggataacatcatcattaataagattgcttttttcattttagcgcccttctttctatactctttttgtctgcatctaaagcgatgtgtaaatacttgctggctttttcgtgattttctgaaccatagaatatattacctaaaagataagcatattcttttacccaatcatataattcttctttttcaaaatacgaaataccttccatgaccaccttttctaattcttcttgtggtgcatagttatgtactgcttttaaaatttgaaaatgatgacgataacataagtcactaatcttatagccattctcaatatattcattagcattatgattatgacctaacttaaaatgttctcttgctaaaagaaacatcgttttagcgttgttttctagtgattcctctaaatgcttaattgctaactctgacatgttttgacttgcatataaaagtcctaaattatgcttgactcgtttaataagaagttcatcattagatttttggaaggtacctagtgctgaaagtaaatattcctctgcactttcgaattcatttagtcgaatgtgtgccatccctaaagtatttaagcatgctgcagtttttaattcataccctggactaattgaaaatacttcattcgcctttgtagccaattgaactgctaggattggtttcaatatgtgatagtaatgaactgcaagccaataattaaattcagctttttcgatttcatcatgcatgtactctaaatatttttcagcttcttcaaattgcattcttgcttcactatggtttgctgtattagtagcataaattgctttaaataaatgatgatagtactctaaaaatgtttctgtaggctcttgtaacggctcaattttatccaaaatatcttttgaactatccatatcacgaattagcagattataccgtgcattcaataaagcatagtagactaatattgtttggtcttccttaatattattgattttatctgcaatctcttcttttatttcattagactgtaatacactttgtgaaattatagcttgataccagtcgtttaataattttgtgatttcttctttagaaataatttcaacattcatatacgctacccccttttattaaaggttaccataacatacttgtttatataaattattttccgaatattaaaacttgataaattttttcagacactcatattaaacaatgttaatttcagatttattgaaccacccccactttaaataaatatctgttaatcttaccaatcaaattagtacaacagttaacatgatacacagggaaactttaattgaatagaaaacatattttgaataactctccttaaaattagtatcagtatctctcattccctcgtctaccgattttaatatccatatttctttaagtacacgtatatatgatttgattttatacgaaaaaccatgaattattaaaaatttagtttcagatagaagacgtagaccataggagttgatgtcccttaacccacaatacattcctgtttttttattgatacaagatataaatcgtcagttttaactatatagttgagaaggaatgcttaataaagaaggaggatcatgatgaaatatcaaacaatatttccctcattaaaaaaatcgctttttatctttatactttctttcagtatgttaattttcgcactccctacctctacctttgcacaatccaatagcaatggaatttctgttacaaattactatgtatctccaacaggaaatgacctcaatcccggcacattagatcaacctttcgctaccattcaaaaagctgctaatgtcgcaacagaaggaagtacaatctacataagaggcggagtttataaccaaaaagttcgtgtcgctcattctggtgcctcaggcgcacccattacttttcaaagttatcaagatgaaaaagtcattctcgatggttctaaagtcaagttagaagatgatgggttatttacaatagaagacaaaaactatattcaagtaaaaggattagaatttcgtaacttaaagtcaacgaaagttaacgaaacccctattggtatttatatcactggaaaaggaagttacattgatattagaaataattatatccatcacattgaagcgaatgtaaagaatggaaatgcacatggcattgctgtatacggtacttcatctagtgcacaaaataatttaaatcatattgtcattgataataacgaagtagcaaatttgaaattaggattgagtgaagcaattgctgtgaatggaaatgtagattcttttgaagttaccaataacaaagtgcatgataacaacaatattggaattgtactgattggacatgaaggcgtatctccagtagctgctttagatcaggcacgaaatggagttgttcgtaataacattgtccatcacaattcatccatcaataatactagttataatgaatattcagctgatggtatttatgtggatggtgggaagcaaattatccttgagcaaaatcaaagctatgaaaatgatctcggtattgaagtagctagcgaacatgcaggaaaaagcgcaagccgtattactgttagggacaatacaatatccaataatatcatgagtggcattgcaattggtggatatgatagtcagcaaggatatgctgaaaataatacgattacgaacaatgtgatttataaaaatgatacaaaagatcaagagagtggccaaatcgaattaaattacgatacccggaacaatgtaattaccaataaccaaatctatgcaggtaatagccgtatttttattaacaataattttaataaaaacactgggaacaaactggattacaatcattactatggtgaattcgatcaaagtaatggcttatggcaatggaaaagaaaaacgtataaaggctttacatcttatcaagcaggtatgaatcaagaaggaaatgaacaacatagtgtatttatcaaattaccctcttccctcaaactacttttaaaataaagcaaatgtactaaaacaattttattccagctcacttcatctcccctctcctataaaagtgaaattaaaattaaaagttgtagtttcaattaaaactacaacttttccgtacttatatatgaaattgaaaatatacacgtgtatttattccaaaaatgaaaagtgttttgggggcgtattatatcacaaatgatgtagaaaaaatcatctcctcaaatccatataactacgaatgattcttattcattaaacttaattaataggtatatacttcttaaaccccttacttatagttccattataaccatttttatcgaaaaatttatgtgcttctgttctagttgcactacttaataagataattcttgtagattcccttgcaattgacatctgctctacatgctccaataatttcctccctattcctttgcctcgaaaatcttcatttacaaccacatactctaaaacggtatatggtctaaattgatatccagggtccagacaaaaagtcataaaaatacttcctataacgttacaattttcctcataaacaaacaaaaaattattagaatcctttcttatttgttcaattctttctggtaaaatcttaatgtttttactatggggtgctaatttcttatatagatttccaattacattactgtcctttggctcagcttcacgaatcatataatcacctatctttctaataatattgacgtatcaacagttgttatctcagtatcttcaagaacatcatgtaaataagcagtagctttctcttcggccgtatttacaaagctagcaactgcctcaggatgtttgatatagtccacacccgctttatctacttgtccaccatgtgcttttttagctatctcatgagctatctttatataatcagataacatcgcaaaatctccctttcttcaaacaaaatcttcccctctagcaagctgttctaaaagtgaaggaggaaaatattgatataatccctcagcaaatcattggagttcatcttgaaacaaaaaatttataaaaaatgccatcctctctgtatatttctacaaaaagaatagctttttttggttatacggatacaattttattttaattacgcccttttcctttacgggtatatactgtattaatgaagaaaattagtccgcagataaagaatagaaaaggatgcacccatgttctaaaattaacaagacttataataagcattataatgcaaaggatacaacctataatatcaatgctaaaagataacttcctctgttaattctttaacttcattcatttttacaccataatccattaatttctttgactaaattgctgcataaaatacaattttgtttttacatctttaaaccaaatatacaaaccttttttacctctagataaaagcactctgtatatgttcattactaattcacttacaacatttgttgcgttcacattttctacaaaattatcgatttgatattgttgtccattataaatgactgttctattatatttattaaatgtaccaccataagctcttgctatttcatttataaacgaattgtcgtaattatcctttaatgtgactttccatagcttacttgtagaatcgtaatatagatcatcccaaaagattagacctacataatcaaactccaagccttgagccgtataaatacatcctacttgctctaaatgattaacagctgtttgtttataccattcatattgcgcagctaacgtcggattccatgcttttacaaattgggtctgtccatcccaaatacgaatatcatcaattttcttcttccaatcccaacaaaacggagccagccattttacactatatccttgtgtcattttatctttaagtacagtatcaatgtcatgtaatgaatcaaatacttgtaaatcatattttttcaaatctacactcttagataagtctcctgttaaaaattcatctacattctgaatgaatgtaccgctattttttgctcgttgctgagtttgcagtgaaagtatttcgggagtataccctaaagctctacgaatattatcgactgtgccttgttcagtaatttttatacgctgattatcatcctgtagtagaacaataatttggaatcttgaacatagattgctcattacatcttgaacatctgttaatcgatgtgactcatctattacaacaatatgtcctctatttcttaactttaatattgcgttaaccgttggcaatttagctggttcatctaatccatgttccatagcatgatctttatttagtccatcaataactgttctaagtgtttgaggaattgtaccaaaataagtgaacggatacctttttatgtattgtcgaatgagttctaaacctaatattgtcttacctgtgcctgcattaccttgaatgactagcactagcttatggttgttttgaaaagcatgtttaataagctccatcgctttaattttcacatctcgttgttcatctaaaagtgctacaaatcgctctccttgtaatgctttagaaatacctgcaagactagcttcactcattgaatagataccattagtaaataactcattgtcctgctttgcaacaggtttgttcacaaatgattcttttaagaacgagcataatttcttctcttcatctttgccaaaacaacatctcaaatagtttgcttcataaatggtatggggtggctcaaatagccgatttttttcagttaagttcggtaaataactcattgtacttaattgaatagcatttttcttttgaagttcactatgataacatctcagagacgttacatagtgatttaactgtgctgctggatgctgtcggattggttgtcgacttacaccaatatcaacatggtgtggatcgggtgaaccaatgatttttccccattcctttaattcaacaatcattacatgtaattgcgattgagaattatagccaattaaaaccgcatcaagtcttaatagatttccaggaataaaatattctaatacgattgatatttctccaagatctccttcattaagtcgctgcacaagtttttggacagaaattccccaagtgtccacttcttgctcactaaactcttctttagcaaaagcatttgactttaatccttctattaataaatcctttatttcatttggagttaatctaaataattgctttacttgcccaaaatacaaatgcattatagatctcctagtcgttagtcaaatttggtatttgttctaataatactatccaccttttttaaagatataatcatttattatatatagattatagagatataaagtactatttagataatttgttcattaccactttcttaattgcccatacatttcatctaactgagcttcaccttacaaatctcttgaagattcattaatccattctttcaattaagatttataaatgcaggttgtctacatttataaatcttagaagttaatgtattcatctatcctaaaatccaatatcgtagtattttttaggcacccattcagaacctttaatagaagaagcataattaaaagttgcttttaaaaattctgctcttagcttactattctttcccgttttcatgatgattgtttctttaagcggatgattactttcaattagatattcattacgcttatataagcgttctaacaaagattcatgtggtactctagcaaatttgccattgtgttcccccctattacattcttgacaagttaatacaagattccatacaccatttaaatccatatccaccgtggataaatattgaacagagagcggtaaaaaatgatctacatcacaggtatttggttgaccactctcaatagaaatacttttataacaataaaaacattttcctttttgatacccatttagcggttttcttacaaacgttaaatttacacgttcgtgagagtgtaaatacctctctggtgtaatagacttcaaaaagaagaattgctcaagctccccatcgaatctaacttctaactttggatttctttccgtccaagcactttctactaagttccatctaccttcaatctcattgaacaaattcgctctttgttcactttcattcaagatataaatactatcagttaatgtgatacctaacgtttttccctgaacagacttttcatagaacactgtattaagctccccattaggaatgttatgaaaagcatctattacattattgaatcctactttttcagtaacttgcaacaactgttcccatgtaattttctgtttattatacaattctagcgcattaataaacttggatgatgcactagtaatttgccttttgccattcccaatatgctctaacatatacttagcaaatatcggcgacaactcctcatggcttacaaaactattattactattccctagctctaatagtgtctttgcaaaagcaaatttatatgtagctacatttcttccaaacaagtaaacagatcgaaatttagattctaatgtttggtcattctcaaggaaattattcatgcaatgcccccttagtaattattagtcctgtacatcaataaggtagatagctttctcaaaaccacctcgcttttcttttttctccttacgaatcacttccaactcttcaagctttactccataagctcccaatgaagcatgaattaattctaaaatatctgcaagttcttcaacagcttcctttttctcaacagcttccttaaactcatgtgcttcctctatcatttttgtttttatttccattagtaactcatcaggtgtgagtattcttgcgttgtagcttagaccctcggctttgataatttctaaaatattatctcttactaatttgttatagataggcatgtttactctcctttatatatattaattatttaaagtaatcgtatcatgataattgccccatccaccacataaaagagcatgctactatatttaatcattctggaggaactttaaagattaatgattatgtttctcttattgaagaagatgcttctgaaggcaaaaaattttatattgtagacgagatcaaatcataactaatgataaatacaaacctttttgtttatcgacacagcatataaagatttacgaagactttggaatcgtaaaaagatgattagctgactatcctcctgcagactttggtcctctactaagtgcacattatgattatctaaagacatatgaaaaaatacgatgaattacaaggggttttatacactctttcctttcacgaatcacaaaattgcacagaaacacagactaccattcaaaataaattaaaggaattaaaaaagaaaattgatacaaaaacacaatgcctttctttcaagaaaaataaaaagaccgaaattggtctttttattcttcctcaccgaaaaacttgataaatctttttccaaaattactcaatttatatttttctatatttatttcatatttatcaggtacaggagactgccactgataaggcatacctgtttgtatgtaatcatcctgaaatggttcgtcaacccgctcctttacatattggaggattccaagcctaaataacttattatccatgtacctctttaaatcttccctttctttttctgcttctttttcttcttccgtgtagtccatttttaattgaatatttaacttcatcttttccggatttttcatcatttccattgggacaacatatttttcagtaaggtgaacaatctcacttaacctcatttcagctaagacatcatagtaatgaaatattttatcaaaatctagaatatcattatcaattatgtattcgaagccattcaatataatctttatcttttctgcttgttcatcattcattattctattaagaacaatagggaagacttcctgtttcaaaaatacttcattttcactttgatctaactttcctgcaattttttctatttttccttttagattatttaattctttatttatctttttaaatttaaaatgattcaatatggacccaatgacaggagcagctccaccaccgatttcaaccacctcttgcacaggttcttgcaatgaatctggtaaattttcacacattatatttattaattcttttatatccataaacgaacctcctaaatatccattcaattattaatataatcatatagtatttcaattcaaataaaaagaacgctataagccgattaatttaaaaataattcttccaatagcaattttcattttccatattaagaaaaattagaattcactccgtcttgaatctttgatactcttaaacatttaatttagactaatattttaaatccaatacagagcttttccagtctcctaaaagctattctttattctcttcaatatggtaacttattgttattaaattcaatacgtttatgtaatccagaatttagtttattttcattaattccactacttgaaaattcccccatcacctcttgatacgctgagaattcctcagaccgcttataatctgagtgatcacaaatattttctagtgatctataaacatatcctctaatcttatcctctgggatatttttatatcttacattttcaattgtttcttctgcaaatttttttataaatctgtttcattgcttttattccatctaccaacagtaaattgagtataaaattcattagcttcattaaagacttaaattgattaaattccaatgatttggtaattgttccttgataattatcaaaattatctttgttcttttttatttctctttttaatagttgatcccttttgtacaggcttgctgttatctttgtataaacctagggtttcccttttggaaaggctggattcactttcttgctttgctgtctctggatttgtttatgtaaaaaataaaattcacaaacaaaaaatcatcagaattcccaaggggcttgctgttacattctatcaactttaaatacaaatatattaaccacactcttaaaaattgatacaaaacaatctgagaacccattttttgataagtgagataaaatcaatattttatttaatcaaaacaaaaggaccatttaggtcctttttgttataaataaaaattaaccatttttactaattcatgaacatcaaagtctatttcagtcggtaaatatttactattatgtacaataatatttaaaaaaaatactggatatttttatttaatcttataaataaaaagcacctctaatatataggaactttttattgatttaatctataaattctttttaacagaacatttcttctcattttcaagttcgtcaatacacatatcgattacctcttgtattattctaaccctagttttatcagtatgactcataagatatgcaatcataataccaatgataaagaatactaaagcagtacctagtccataatagaatacttgagaaagtccactatccatttttggaaggaggtattttgtaacgtcaacaattcttcctgttactaccatactagcaaatgcggatgataatattgcgaatataaatgtttgaaatactagcactgtactatctttttccactacatttaaatatgctctaaatctttttaatttatttatatctctatgaaaatatcgttgtattcgttttttaataataccaatattatcaataatatcttttgaaacaatagaatttcctattattaattgcaattcagcttcaatatcttgtattccccctgtccatgcaaataactccatttcttttgttttcttatttaaaatttttttacgtatccatttgattgtctttactagaaaattagctattattatgtccaataaaagactaatgatgcagtataaaattagtctaatataattaatcccatttcctataaatcctcttaaagggtctaaaaaaacagagaatactattagtattacaaacaaaacaaatgtgactaaacacagttttttcatcattaaaacacacttcctatatattttaaaaatatatatttatatataacatataacaaatacataaatataatcaatatttctttccgctaaaaaatcgtttaaaatagaccaaattcgtctctatataaagcgaagatccttttctactatgctattcaagtacttccgttacctaagttgcatcccaacatttatactttttcttttttaagctgttcgattgctataaaataagttgaattcttatcgattgtaataatacaaagctttgaaacacaatactttaggaaaaatatattttaactcttttcttattccaaactatttattttattttgtataatatagatattcatatataaaaccatattacaaggaggcctttatcttgaactatggctggactggaactattgaacaatttaagcaattagatgtacagttttttattaaacaattgttagctcatgtttataaaaacaatacaaatgatccaaaaatagattctcaaaagagagcatggatggatagttataataaactacaagatttatttaatcgattttctaatttagatgcatcacttatttttgaatatgagattttacgcggaggcggtcgtcgcccagatgtacttttactgatcaatggttatctgatagtcctcgaatgtaaaagttataatagcgtttcaccttctgaatatatccaaacatctctttatatgcgtgatcttgaacattatcactcagctattcaacaatctaacatgcaagtcataggtgttttactgcttacaaactatgaaggcgaacgctggattttccaaaaagagtatcaagtaactctttcaacagttgatggattggaaagtattattaaacgaatattaaataaaacagaaacaccaactttaacgctagaggaagtaatcaatggtgtctatgaaccctcaccttctatgctagaagctgctcgttctattttaaataatgaaccgctccctgacattaaagctgtatcaagcagtaactttccagaagtacaacaaactgtacgctcaattattgaagaagctcaacgtacaaatacccatcatctcattttagtatctggtgagccgggagcaggtaaaacatatttaggtctgatcattgcacacgagatgaaaaatacagtttatttatctggtaatggaccattagtagacgtattacaagacacgctgaaaaatagaaccttcgtacaaggtctatatggatataaaatggatttccttgaaaagagaatgattccaaaagaacaaataatcatttttgatgaggcccaacgagcatgggatgcaaaaaaagtcgaccaatcactcactcgaagaaatcgagaacctcaaaacttaagcgaaccggatattataatgaatgtcacaacaaataataagccgtggagtgtaacaattggtttaattggtgacggacaagagatctattctggtgaagaaggcggtctcgctctatggaatactgcgatcgctggaaaaaacgtgactgttcactctaaacatcctaattctttatttacaaatgcagcacattatagaactcattctcagctacatttaaactcatctttccgtgctcatgcagctttaaaatactataaaattattaataccttattagatgctaattttgaacaaacaaaacagcttattcataagctaccaaaagaacattatcaactttttattacgcgtgatttagccaaagccaaacacactttacatcagctttatcaggatgatacaaaaacagttggcgttgtctgtgctggtggcgctgatcatcaaaaagaagtccctgttctaccaagagatgaacgatatgaacgccctagtaagatcgctcaatactttaactatgccgaatcccaatactattgtagagcgctcaactacagctcaactgaattccaaacacagggtcttgaactagatatgacgcttgttcattgggatgatgatctatatctacaaaatgggaattggaaggggcaacactatcaatggggtgttgaagatccattccaaattaaactcaatgcatatagagttattttaacaagaggtcgggatggaacaattatttacataccaccaaaacccattctagatgagacttgggacttattaaaaaaccatttacatattcctgaattaacgttttaaggcttataataagagacgatattctagactcctttagaatatcgtctcttatttttttattttataacaaccagagaattgttcttacatgccttaaaacattgcaagaaggagtttctttaaacaactagtattataagaaattgtcacttaagaagttgctgtttcttttattcccctaaatactgaatcgctttgcgatacttctccaatcgttttaggtctttatctgttatcctagcaagtcttgagcgatcagaattatgttttaagtctgcaagtttaactgtacgggcaagagaattttctttcactctgcacaaatactcaaaataaggtgtgtatttctcttttgtcagtacctgcactgcctcaactacgttatgaggtataccagcacttaacagatcattagcagttatctctgtatcttccagaacatcatgcaaataagcagtagccttctcttcgttcgtatttacaaagctagcaaccgcctcagggtgtttgatataatccatacctgctttatctacttgtccagcatgggcttttttggctatctcatgagctatctttatataatcaggtaacatcgcaaaatctccctttctttaaacaaaatctccctctctagccagctattctaaaagtgaaggaggaaaatattgatataatcccttagcaaatcattggaattcatcttgaaacaaaaaatttataaaaaatgccatcctctctgtatatttctacaaaaagaatagcgttttttggttatacggatacatttttattttaatttgaattacacccttttctcttacgggtatttactatattaatgaagaaaattagtccgaagataaggaataaaaatgggtgtacccatgttctaaaattaacaagacttataataaacattataatgcaaaggatacaacctataatatcaatgctaaaagataacttcccctttatttttttcatttataactattcccttccagatgccacctttaatttataattctcaatataataataacatacgtttcgatttttaactttttacatttaattacttttttggttctggtgcaacaaatacctttattgtgtgcaccagggtagcaagatagcaattaccgatgaaattaaaagtaaatctgaacaggttgaagaatccattacaaaaaagctaacgaagcaaaaataaacaacatatagatttgaattatatttctcaacaaccaaaattacttaatgtggtaaaataataattggattggcatccaataccatactacgttggttcaagtcgcagaaaggcaccttagggtgtcttttttttgtttgaaacacattctgccaaaatacctgtatcttttttgaattacgactcatataatccaacaaacttcgtatatataatttgttaccctaaatgggttgacaatacgaacagttataggaggattttgtgaatggtaaaaacagcatgtgtaagtatgattactggcattcttttaatatgttcaacaggatgtgccactcaaactgattctattacaactaaaactcaatcagtagatgatggcgcatatacaacaaaagaaatcacagacgcatttcctgtaggaacccccataactacttacattcaaaaagaagataaactgaacgtaaaacatatcaccagtattacacttacagatggtggcgtcggtagagttttggaagcaacagatggttttgttgttgtatgtgggaatgaaaaaggagtttttgatgtgttaacatttaaaactctggaagatgtaaagaaatatgaacagagtttaaagcgataattaatatcctccttatgccttttacacagacattgtcctcttgctcttgctatggccttttctaagtacagtataattgcgtcatgaatacacacacgttataatagtcacctaattacatattaagaggtgcagaaaatgaataaaactgaattaacaaaagtagtagcagaaaaagctgaacttacacaaaaagatgctgcagcagcaacacaagcattattagatacaataacaaatgcgttagcaactggagagaaagtacagattcttggttttggtacatttgaaatacgtgaaagatctgcacgtacaggacgtaacccacaaacaggtgaagaaatgcaaatcgcggcttcaaaagcacctgcttttaaagctggaaaagaatttaaagaggcagtgaaataattacacatagtcaaaaggctttccacaccccagctttgccccctacccttcgcatatcctgttttggctagctaatctggtttgttaaggggggaaaagagaaggagggcaaaaaaaagaatcctttaaaaatcaggattcttttttttgaagtatcgcctattgtaaagtatttttataagaatgtgtagtagaaggttatagcaaatccgattaaaaagagtaatgatacgaggagataaactctttttttgttatcttttgctattattttatctagtgtattgaactacccccactttcacttcgtttagaagtgagggattcctaagtaaagagttctatcgaactctaattgattaggctaaccccgcagtccttgcggttagaagccttatcgcttcatgctttagattgatacttgcgttaatatccctatcatggtgtgtacgacaagaaggagaaaatgtacatatttattcaagcgttaatgtacatatttaagttagcatttatagacatcagaaaaaaatggaacactcaattacttgtaaagtataaattacgaggattactcaaacatagatacgaaaatagcccttttaaagcaataaatgatttatacccaagtgagtttaaagaatgggagtttggtatgactcctttaaatttttggacgaaagaaaaggcattaacgattttgagatggatgattgaagaaaaaaaagggttatcgaacgaaaagctcttacgcgtatacggcaaaaaatggttggagaaaaacaaacttagtgcccctctggctatgtactggaatagtagtccgtttgcaatgattaacgatttgtaccctagtcgttttaaagaatgggaatttctcatgacgcccaataacttctggacaaaagaaaaagcattagaagcattgaaatggaccattgaagaaaaagaaaaattaacacccgaacaaatactggatgtatacagtataaagtggctaaagactcacagattagcgtctccatgtcaattaatgtggggaaatagtccatttaaaatgataaacgacttatatccaggtcgctttaaagaatgggaatttaaagttacaccagttggctattggtccaaatgtaaagcactagaagcattaagatggaccattgaagagaaagaaaaactggatgaaaaacagctattaaacgtatttaatcaacgatggctcataaatcaaaaattacggacacccttacaacgctattggaaaggaagcccctacgggatgcttattgctttatatccaaatcgtttttctaaaggtatgttaaaagggtattgtaataattaaagtggaaatgtaagtatgcagagacgccctttggtgtctctttttgaaatcctatgtaagtacattcttatgtgcctatcgctttatttatcgaagaaagtgaacctgttatattatttcccaatccatctcgtcaaagccataccaagaaacccagcgcccatccctatcatccacccagttttggcgcccccaaacatagatcccactcccgcgccaagaaacgtacagcccacgaatactatcccccgatgccccagttcggtcgttccatacttcatccccaccctttctttacaacatatactatatgcaagctaaaatttctagcttatgaactgttcattttctcgaccataactatatgtttcatatccattacttacaggtccaaatgtcatttttacatcaatgcgttacttaacttcattggttactttttttcatcttatagaagattatttctcaacacataacacatggaattatattaccagtaatggtaatataaaggtaccttcaattgttaactgttgttccctttttgaaagtcctgtcaaaagacaggactttttaaatttacttcctactaatttggctttttcgttaatatcctttcaccttgtatttatttgttttgttatctttccttaacaacaaataagacgtcgccaaaatcaaggcagcgcctactataattcctatacatttaatcaaaatcatttatcctcacattatttatttctttgcttccataccctattctctttacgaaaagtattctttccattcatgaagtcagctgtattaccaggaatgctatatttcttattctttttcttagacttcttcttcagccttttctcttcttggatagcttgcaaatccgccttccattgtttcaacaaatccttttcacgtcgcatcgaatttgtaccccttggtttaaaatgtgaaccagataattagattctacctattcatatggatatcctctaatccaatgtaccaagttatgtttttctttttaaatagaccaacaatatattaaaatattctatatatccaaggaggtttgtcatgctcaactttcataaagaattacccctattaggattctttttgtttttatacagttttattggtatcatctttttattactattcctgagcgtgtagtaacaatgcaatgcgtatacatatatgtttaatgtgtaaattctataaaagaagtaaaaagcacctctgctggatgattaatatatactatatattaattaggagaaaacatttggtataatataagtgctttattatatgtgttttcttcaaaacgtcttaggaggaaaacagttttttattttttcaatagtacttactaactatttctgttaatatttagttaccgatatgtgtatcaaccggcctgtgcttctgtacgggcttttttgatgcttttatgcttcgtaatacccaggaacctgtcttagtattcgggaattctactagattcccgaatactaagacaaacaaaagcctgccctattaactctataaagacaccattgcaaacataatcccttatagcttctatagattctcaactttttcataatatttatgagagtttttttatattcatatttctgtaacatctttatataacgttttaatatattatgtgttaaacttaaaacattccaagaagtcctttacttttagaatcgacaattcttcaatacccttagtcttgccctgcatcccctgcagggcttttatcatttagctagaattgataaagccttttgtagatttcttcaaccttatctgtgctgttatttatatctctagctcttaaattctttgtgagccacaagattttcttccgttcatattcatttctctgctatttatccgttattttccatccttaataatccgtttattgatgcgttcaataactttatccttagttagattttcaataataacctctattttcctaaaattcaatcaaatctttataaatttctaatgagtattaattgataggaataccacagcataaaatggaatttattctcaaaagttattaattattctatctgtcaaactattagtttatctcttcttcatattttaattgtcttttgaccacgatcaaacgaataaaatacacaagtaggtaaggagcattaatatgattatacaagaaaaattatctttttcagatctagattcattagattcaactacagactccataatggatgcgtttaaagatctttatggaatacttcctgacgaaattgcattaaataatgagacgtttccaattcataataagcctgctattactgaacgttatggtcatgcttgttataaaatgctgggcccttttatatttcgagatcttgaagaaccttcaataaatgaaataaccctaaaggaacaatttgtatataatcctaataatgaagaaaaagagattgtagtgataataaaagaacaatgggtcaatatacaatcttggagttcgaaatctattacaggtttaactttaaaatcagatcttattattgcaggtaaatttcaatcgggtaatgaatttaatatttcaacttttgcaggagaaagtaattcaaaatcaattcatacctctccttcaattgaacattctattaaagtacctccaaatagtaaaatgaaaattgcaatgataggaacattaattactgaggttctacatttccaatcaattataacagtacaaggcatgtttggtgcatgttttccacgtatggttcgtggacattatgttgggtttaaaagcgccggtcacatcctaaataaaacgtttggaataattgaaggatccattaacaatacagcaattcaggatattgaaataaatattaaagggatagaaccttattcctataaacaaaaagtgatcaagtagtaaagttgcaaagcaaaaaaatatactgttttttgattctatatcatatatagatcattagaataaggaaaatgaaaaatctatggctaacagtacttcaaaatcattgaatgggggaaaatcaattgtcaaacaaaaatgagttaagttttttcattattagattagtattagggttaactttttttgcacatggactcataaaatttcaagatggtattcataatacagaaaatttcttcaacagcctaggaatattcgattggcttgcatatccagtagcaattcttgaactagtgggtggaattttagttattctggggcttggtacacgaattatttcaaccttattttctttacttatagccggtgccattattactgtgaaatttgatcaaggatttataggagggtatgaatttgatttattattattggctgtttctttattttttgtagtaaataacagccaatctatttcattagataaattcctatcgaatcgtaataataaacaacaacaaactctataaacataaagtttctcctcaacacgtaaatctttattttgtgaagaagcttatttatatgaattactcaatttagatccgaaaaaagtaaaaagaatcccttatattttgaaaaagttttttcaaaatataagggatttataatttatttttaaattattgtataaaagaacttcaacttttggttacataaataccttcttatcttttttaaaacgctctgtatgcattttctcagttgttaataccactttctgtggaatcttatataatggtagtttatctttacagaactctcttaatcgctttctaaattcacttacactttcatttgtacttaatttaaccacagccttaaccatttgccctgtgattgcatttttttcaccaacaacagcaacctcctttactccatccattagctgtattacattttcaacttcagctggaaatactttttctccgccaatatttataatctctgattttcttcctaaaattttaatataatctccatctacttccaccatatctcctgtcataagccagccatcttgagtaaatggacttggagcattaatataaccaatcattgtagacattgatttgatctgcaacattccatccactactcttgattcaatattcttatcgcttagtttgatccacaatgaatcattcgatttagattgtgaatataaaactccatattctgacaaaccatacatttgtgtaattttaacatgagggaatatttcgtttattttacttagtgtagcctcaggcataacttctgatccataagaaatggtctgcaaactatttaaattatactttttataaacctcactcagtataagtagatttataaaagttggtgatgcgggtaaagcttgtacttgatgtttctcaatcatgttacatactcgattaggggtacgatcatcaataattaccaaacaccctgagctggaaatgatttggaatagagtattaactcctccaatgtgatcaaataacataaatggtataacacgttttgcactccttgcgacactgtacttcttttgaagtaatgtaaaatcatgtacaattgctttactacttccggttgtaccagatgaaaacaatactaatcctggatgttttaactttttcagttgtaataataaatcattttgaatgtaatccctttgtatattgattatttcaaagcctcccctttcaactttaattacattttctaattcaactatttcatagtattctttcttcttactgtcaaccaatgaatttaatatcggtactacagtacatcctaattcaataagtgctaaaaacattgctatagagtatggagaataatccgcttccaaagagactattgtataatccatctttctatgttcatttaactcccttgtataaatctttatttgatttagaaaccactcatatgtgtaagttttatcctcccaaactatagcttcgcattctttattcatttcaaatctttcaaataaaaaatcaatatgcatacctaacctccttttaaattttctcctttaattttttgttatgttagtgattttaattgttcctggcattctaaaatatacgcaactaatgtttctattgttttaaatgggctattatgttgtgacattgtatctaaattcaccaaatcaactgataaacccaattcatcttctaagccttgttcaatacttaccaataaagataccagccctaacgaatctaaatacccctcccaatcataaagatgtgctttcaagcctttttcaaggtcaattttattttcaagattttcattcacttcttcaacacagcacaatacgatttgaataaccttttctttatttgtatcttccaagtaaatacactcctttttataaatcatctttttactatgaagatttccttccggcaattgtagtagtatataacatgaacactaaatacacttattcttctactaataaagtttgtaagtatacgtagtagccttctctacttctcttaattatcttttccctattaagactgaagactataattatgttgcagaagaaataaaatattttcatgtaagacacactctctattaataatatccatcattatcaaattaaaagattcgagatcacttaagttactatctttttttaataatttaatatgtgcaatcttatatagtctttcccataattgttttatatccattaactcactagtaatattaataaatttatctttaaataactcgttcatgtctataagtaagtcatataaaaaatatctactccatctcatatcaaataaacatttcaaatacaaaggaaacatatttctttgtttataaaaatcttcatttatattttctttaagttcaagagctgcaatcttaccaaaataatatatcttattgtttttttgtataattaaacctcgaacatactcactggatattttttttagtgttctcaaaaaaacatctttaagattttccatgcttattttttcctgtataatcacatcaattgatgagtaagatgaaattctttctataccttttgcttgagccaattcaggtatagcttttcctcctttccaaaaagaatggaactcctccattgatatctcacccataaatttattaggaactggatcttgaacaaatactctatcttctgtaagtttgttaattgcgaggtaatggtctgtaacatatttatctgtatggacgtctatatgactttttataaatttggggttcaaataatcattactatatggtagaaaaaaggtgcttcctaaggcaataaatacttcttgacgattcaaacattcttttatatactgaagccctttttcgaaattagaatatacatgtttctccatacgaaatgtttgattatattctaacaactgtgtatatcttgctacagaaggtaccgatgtgatagtatccatacgatatgctggtatactatataactcttcattcgctattaaactcatgtaactaatgctacccatactttttaatttatcgtgaagaattgggatatagcatgaataataataagggacatcaaaagttggaattaattctttcattttcactacagcactcaccccatatttattttttttacagccctatccagttctcaacagtataattcaactgtaagtccttagtagctttaaattttctatttggaataggttgtcctaatttatccacttcaaagagcctaaatcctcttgaaaacttaaacctgcatgcaaggtcccttggcactttaaaattccctgcaaaacgatttttttctattctatctagtatcatgcctacactcatataaattcgttcaccaactggtgtattttcaggtacttcgactattacagaaacatctacaaattctgataatgtttctattaccttatattttttaggtattccttttacaccttgtgtcacaaaggtaacttcggcttctcctattttcttaggtataattgttccatcccccataacctctaacacatctgggttatcaactaaaaatacaccatctaaaacactcatttcaaaaccactatcgtacgtaacaattggattaattttcactttcattccagttaatccaactacatctcgaccatctaatgtaacattaactatattaccaacatctccaaagaaatatattaatggtagatgcatacgttctccccagtctttctcaaaatgtgcaccatttggatcctgataaaaaattaaatcatctctatatttataaccattttccaataaagtttctgcaatatccctcacatgttttaccaagaaaaaaccttccgcactacctatatccatccatattttcaagtctttttttccttcatacatttcatataattttaattccgaatgatcatcttcaactttcacaaagaatggagataacatcccaattttcccaaacacttcaggattgcggaaaccaatattataagttgataaaccacctgctgatgaccctattagagcagtgttttcagtattagtcaatgttctaaaattttcatcaatgtaaggtttcacctcattgattataaatttttcatataataaacctgagcattctatatgtttatctggtgaaatgaaatgacaaaactcattattttctatgattcttttatgtgctatacctactattattatctcttgaattttaccttcataaattagcatatcagtcgttttgtggacattccatgattcatcattttttactactggttcaaacaagcgctgcccagcatgcatatataatacaggatacttttggtacgaattactttcataaccaggtggcaaatatataaatagtttcctactattctcaagtatttcagaatgaaaattttcaatcgtaatcactttagaagctcgttccatagtaacctccaattttctatttttcactttcattaatacagttcttttctagttttttctttaaaaccgtatcctttattaacttttaatagaatttttcagtataagcttttgttttaactaccagaatgaaattccccaaattttaattacaattgtaaaaaaagtttaagactccaccaagatagttttttctgcagtttgccattttacaactacttctccagttccaaaactcggggtacgatatttatgattctctccgccttcaatcaatagtgtgttattgatctttctaataaatttgaattcaagcaaggtatcagccggaacacttatatcaaaataacccgtaggaaattgatacattatttgattaaaaaatggccctactgctttgcaaggattcatatttcctaatgaatatgtgttccccattataaaaacttcactctctggtatttcatatccattttcaataacaaatcgaatacaaacttgctttgtatttaagacctctatatgtttataaatattactcctagttcctgtatctgttacaacagtaatttcatatttaccatcgtttactgctggaacttttacttttatactagtatgtgaccacgaaacaacttccgcctctttttcttcaaataatactgatccttttttagaagtaaagccacatccttcaatacaaattatttgaccaacggttgtcattttatgtcccacagttcctattaaaggtatactatttactcctttatggtgccaaacatgtactgacccaggtccaagccataatgaatctatattattattttcaactctaattgcttcaccatctaaaagaccatctaatatgtccttatactttctagaaggaagaattgttttaacatcttttatttcatatccttctgttaaatttcgattcaacgctattaataccacatcacttccaaagtacctttcatatacataaatatcattagttatatatctttctttggtatttccatatggaagtgcataatttaaactacgaagggaagataaagattgtattatcttaaagttatctgtattcacatcaaaagattccatttgaccacgattgttcggatctccatttccaaccatatattgctctgtaccatagtatacagaaggtattccccttgaagttaacaagaatactaatgattgttctattctacgtttactttgtccattaatgtgaaaacggtccatatcatgattatcaataaaagtaacaagattatttacatcattataaatttgatatgtttcttcaatcattttgtgtaacccatgcatggaatccattccatctcgaaaaacttctcgtactttatgagcaaaactaaagtctaataaactcataccactattatttgcaaaatgaacatttctatggtcatactcatttggattgatataccattcaccaaaaataaatactggtctataattatagattgaatttagccaacttttttgccagccatatgacatgtgttttactgcgtcaactcgtataccatctatcccttggtctagccatagtttaatagcttctttaaaatacaaatcaatagctatattttggtgatttagatctgcaagatcaaataaattacgataaactccgtcttcatattcttcaaaatccgtcccaccattatgatgaaaataatgattgtaatcattatcgtatccaccaagtaacaatccattatcatataatctaccattttcagcataggtcgcatcatcatgtaatgcaggcgaagtgtgattaggtgcaaaatccataatgattttaatatcttttgcatgagcggttgttattaaggtttgaaaatctccaaatgtcccaaaaaaaggatttgttcttttaaaatcacgagcccaatagccatgatatgaagtacttcctaccaaatcatttattggagtaaagatattttctaccggttgagatatccataatgacgtcacacctagttcagtaaaataatttgtatttaatttttcaataatccctatccaatctccaccaaagtatttctttttatttttcctagattcatcatataatccccctttgggattatatgatggacatccattatggaatctgtccgttacaatttgatatattatatccttagaaaaattaacgttgttcctattcaccttaagcttatctttttctttcaaatgacaacctccatcccatagaagcatttaccagctattttcaaacgtttagcactctacccttaagtactatttgaaaaatagttaaaatatatttcgcctcctaactagtaactcatgtttcgattcaatttttcacacaaaataatgtctacaagtgggttctatatttgtcctataaactgtaccatttgatttatgtcgaagtaagggaaaaaatgtcattatatagggaggataaatatagaaaattcttacatataattatgcttacaaaatatagccccaataaaatacatagacaaaacattttttatttggtaatattcacctgaaaatatttggtaaaactttatgcggagaggagtattaaaagtaaatactagattattaataaaaatactatttatactactaataccaatcttatattccaaaataaactataaaatataaatatagcttccaatcttacaaatattgaaaatccaaggaaaagctgtaaagaaatttcaaaataatctggagaaatattttatttttaaaaattttatataaaaattaaaacattattgtacagttaaaatgttccttcctaaatgctaattaaaattttctttataaattaaagatttacttctacaaatttgataatgccattagtagatattttctagtaatttaatttcataacaatttaaatccacttacattctaagatttctatggttaatttatattgttttttatttttcaaacatttatgtacttaaatcgatttcatacctgccgtttttacctcaaaataacaatatcatatattaatatagctcttttacaattagattccatttcattaatcatctaactaactcgattactaaagttcatcaccattagtttgcaaacaaatttttataaatgagatacttaaatttgtgaggtgacaatactatgcaacaacaggtcgaattagattccgctcttgctgtttcttcgaaaaagacattatggaaaaatcgtacatttacttttgtatttacaggttataccttatcaatgtttggaaattcatttcacagtattgctttaaacctctgggtactgcaagcaacaggaagtgccaaattaatgtctacaattgccataactcatatggtcatgagcatgttgttttcttccattgcaggtactgttgcagatagggtggatcgtagaaaactaatgtggataacagatataataagaagtcttttaatactaagcatcgcattttgtattgcaatacccggtaccccctttattcttattattatcttaaccgctcttacttcctgtgcaggattatttcagtcacctgcattccatgcttccttagttgatattgtaggaaaagacaaagttcaacaagctactggagtattaaatgtagcagataatgtatctcgtatttcggggctagcaataggaggagttgtagttgcagcatttggtggtagcattgctatctcagttgacgcagttacatttatgttatccgctattttagtgttgctaagtggaaagtttcctaattctacaaaaaaaacaggaatcaaaaattcatttcaagaggaccttgttgcaggattcaagtatatatggcagaacccttttgctaaatctgttattatactctcgcctactttaatcacatttttcactgcttcattaatgcttattcaagtaatgtctgtaaaagtgtggaaggcaaatccgattgaatttgggataattgaatctagcattccaataggttatatgttaggcgcaggcattattatcttttttgataataagttacatcgacggggttggtggataatcctgagtatggttttactagctccaatctttgtagggctatcttttgctccatctgttctttatgcagtaccattaattctcctcttgggaatacttttttcattttgtacattgcttgtcaatgtgattattaaagttgaggtagatcctgagttacagggaaggacttttggaacactaggttctcttacgagtattgcatcaccagtcgctttagcaatttcctcatttttcgctgacatttatggtccaccattaatcttattaataaatggggtcttattatttatttcaggactaattgtactgttctttcttaaatcaattagatcatataaatgattctttttcgttataaaaaaatttaagtatccaaacttgaaaaaagccgaaattgttaaggatatcaactccttcggctttttttctatatcatttaaggagagatttttatgccaaagaaaatacttatactcggaacctttctgatagcggctagccttttaggttgcacagatatagaacacaaagatactctcaacaaaatagaagcacccggaaaagaaccagtggatgtaaaagaaaaagttgcacttaaacatatgacagcagaagaatatttaaaaaactataataaaattaaaagtactgtatctacacaaggcattgaaattcttccatttaatcttgaactagaaaaaaaatctaatacatataggttttattaccctaaagaagtagataaatcagatcaagatatgaaatgggtaagtgttatgttaggagaaagcggaaaagtaattgatggaattatgtatactggctacgcagatatacctacgattaaggcaatgattcaagctactaacattacatggactaatgaattagatcagttaattggttcaataggaaatgaagatttttcaaaaacattggaaattgaaaaagtgaaactatctgttaacggtaattcgaaaaatattaaagttatgatagattcaatgaaattagatccacctcaatccctttaaaacaaatatagtcccaaattcctatttaatttctttaattttacaccatatagaaatttatttagcttttaataattaagactagctatgagactatataaaaaatcgtcagcgcttttaaaaagcaactgacgattttttattctctaacattttcatttaaattggcatcaacaataattccattgacatctataataattatgtatgttatatatttcttaatctcttgttttaattaaataacagattcgctatgcgaaccgaacaaacaatctcttatttctccatgattctacaaatgcgctttaaattttatacaacttgaaactgacccaccaatgtcatctttatttgatgaggccttttctatttttaaatcttagtgcttttaatatagtttctttcatgatttcgtttcgatttctcttttgtttccgttgttcttgaaatgaaattgaaaattaattatagtatcccaaatggtatacacaagctatttcacacaaatgattgaccacgttccttaaattgtatttaaccattaatttttgaattaccaataatatttttcttggttattacattaaagttaatattatgatatatttatattcggaataattatatcttacatttaaagggagaattctaatggataacctactattgaaaaaggacttaacaacggatcaaatggttcttgttacttcagagtttgagaaaaagaaaaaatcaaaaggacttgcttacctaatttggttttttctaggcggacttggtggtcaccgctactacgcacgtgactttggtatggcaattgccatgacactgactcttggcggacttggtttctgggctttaatcgatgttttctttattggaagccgaattggtaagaaaaatgaaatattagaacgtgaaattattatgaaagttaaaaagatgactgcttcaaaacgtttatcttcataaaagacctcctttaggaggttttttatacaaacacttcaattttacgtaactcgtccttacttctctttttatgtatttttatgttttaagaaaatgactccaccaactagtaacaacgatgctcccactgtaatagacttgacgcttgtatggaattgatcacgcagatatttcgatgtaagatttcatgtttaattcagatatattgatatacactaacaatgaactactcaacattttcattttaagttagtatatcaaaccctaactacctaaagaactcaagtaaacgtatcttatgtcattttaaaaaatacaaaagtaccttatattttataaggtacttttgtattttttattttagaattcctcgatttaaactgtaaaattgaaatataatacagattacgaaccgttttacacgtatctcggatggacttcagaatcacatattgttataactactgctattcttctctaattacatctataacgttatcctttttaattttccgaagcggaattagtaccgatacataactaatcaacagtgcagtaataaatgtgataaaactagattgataaggaataatccattcaaaagacaccgtatttgacaatgctacataaagaatatacgacaacatacagccgaaaaagatcccttgtatacttccaaagaaaccgtacaggagtccttcatatataaccatctttttcaaatccttctgtgacataccaatcgattttaaagcagccaattcttttcttctcataatgatgctgactgtaatggtatttaaaatatttacacatccaattagtgtaataacagctataaatccgtaccctaatatttttatataaagtatattgtctgtatggaaattactttgaacaatattattttgtacatctatagatgcatctccacccagtttcttttgtatatctaaaattgtagcatcagcccgagattgattctctaaatcaatttcaaaacctgttaatttttgtggagatggtgtaatatattcagctatttgttcactagtaataaaagttatggtatccatcactctgctcatattaaaaatgtccaattctacaattgcagctatttttaaagtttctagtttttcttcattgtaggagatttcctctgtagattttctttcttgctgacttgttatttggatttcatcccctacctgaaaagtgcttagagaacctatatattttttacttgtattcatatcatttgatgcagcttgttttactaaaacaacctctttttcacgatttaattttgaaatatcaattcttccactagttacattttcagctagtttctttaaactattctcatcgtatgcttttatttgtgttttcataatttctacagtttgattattatattttattttttgatacagcgattcatttccttgtaattctttaatttgtttattatttggtactttcgtataaaaattatttgcctgatatttcttgtacagcttctctacgttattaactttataaatattttgactcatacgatctatgctaggcttgtctaaatttgaattaaccgtaactgatatatccgattttagagcttgaatttccggttgtttacgctgaatggcagtatctatgagaaacgtaaacgtgatatacagtacactacttataataatagacaaaattgtaactgtatatctattgggattcctttggatattttttaatgccatacttaacggaaaagatagtggtttctttaattttgttctcttttttttctttattttttctttttttatagctaatcggctacttacggccaataacggtgaaattctacctgcaaaaaaagcaggaaaatagcttgaaatataaacagttatcaatgtaattaaagaacatacacatataattaaccaatctaatttaattgtatatcctatagagtttttaagtacgtttatcaatacttgattaagtaaaaagactactaatatactgcacaaaatcccaaaaaagatagcaataatagaaagaaatgttgcttcccttatcacaatctttctgatttgtttttttgtagctcctatactcctcaataacccaaactgtttcattcgctctactatactaatttgaaatgcattgtaaataataacaattgtagaaatcacaacaatcccaatactaatagcggctgccgccattatctccacactaggctttaaggctttctttaattggtcattcactcttatattttctttattcgtcaataatttaaattgattttcaacttcatcaaagtttgcgtacttatgcaattcaatcaatacgctaccttctccaactttaaacttatttttatatgtcaataattgaccgggtttattttcctgattactactagacttatttaacaaaccaacaagtttatattttttttcatgaatagtaaacataccgcctaatttaagattaggcccgaagtaaggcagcatccatttttctaaaacagcctcgttttcatttgaaggtagcttaccttctacaggaatactagactttaacagcttcaatgcttgatgatctgcatacatataagagacagctatctcatcaaattggatcacctctcctggagttatgatgccataagaagatatattaggattactttttatcatattgaaaagcttttgattataattttcaactgaaatatttgcagaacccatagaaccttttttagcattttcaattcccgaagtgtatccactattaaaaaaaagtccaatcgttgttattagcgccaacgctagaataatacctgttaatgttagcaaagtacgttttatattacttctgagatatttttgacttaactgtttgtaactatgaatcaatactcctcccctccatatttttcttgactttgcactaattgtttatctgaaataatcatgccatctgtaatggttataattcgatcagagtttgatgcgatagcaggatcatgagtaattaaaatcaccgtctgattatattttttagccgttacttttaataaattcagaacttcttttgtattttttgtatctagatttccggttggttcatccgctaagataatatcgggtttatttataagagatctaccaatagataccctttgttgttgaccacccgataattcagaaggcaaatgatctcgtctttcatttaaccctagagttcttataatttcatccaggtaatgatcatctacctgttcttcgtccaatagagctggcaaagcaatattttcttgtacattcaagacaggaattaaattaaaaaactgaaatataaagccaacttttcttcggcgaaaaatagagagttcattatctttataattgtagatattttcatcacctataaacacatttcccgaactcggacgatccagccctcctaaaatatgcaataaggtacttttaccagaacctgatgctccaactatggttacgaattctcccctacgaatggaaagattaattccttttaacgcctgtacttgcgtttctccttctccatatgtttttactacattttctaatctaacaacctccatacaactcatccttttcacagattaattttgaatctctacaaaatagattttatccttatcgtactcaccattctcgtctttcactgcatacacttttgaaacgtattccaccaccttatttaccttatttttatttttataatcaaacttttcttttgcaaactgaattaacgaaaggcttacttctttttcttttaattgtttatacgtttcctcattaacaattactatcggtgatgaaaaatagccaatccaattattttgttcaatatgttgaacaggtatcatttgtccatttaaatttaaatttccatccttaacttcctcatcttccgcttcttttctataaaataaatttttttcactcgctaattcttttatttcttttaccggggttgaagttattgaactatcttctttagataagggtgttcttacaattcctttttttaagaatttttctgctgtagattttgtaataaccgcgtattgtttctttctaacagatgacttatcaaggtctttgtccatctcttcttcagtcatattttctcctttttctttccattctttcttaatatcttctttctgttcggtagtgagttcttgttttattacttctgtgaccaatttataactataatctgctgtttgcacgttttgatctttatacagatttttaacagcagatatattttctttcgttccagataccataataccgtctactggttgtgagggaccatttatataacgatttacagcaaaccctatacctataaaaattgctgttactactagaaatcctattatctttttcattttcttcctcctcatatactatgtttaatctgggattagaacagtaggttttttctttatataaacagtggctaaaatgctacaagtcttaataaagaatgattaccttcagtatagacgtctttaattgttaattgaataactcttgtcttactatatatactttaatcttacagtttagtaagattactaaatctaacttttgatatactcgtaacactgatcaagatatactttaaaattaaatggcttttatacacttatttaagtacacacatatttttcaaattctcaaaaatccgctcccattcggctcttattctcaatgatttgtttttttaaatccatttacataattaatgcgaattcaatttcatttaacatttttgtataagataacttaaacaaaacattaatggttttataaaaacgtacaaattcaacaagacactattacaaggtttttcaaaatataagcaagtacatgtatgaattacataaatattctactttaagtaattgtttgtatctcattatgtactaaaaagcttcaagccgatttgggtattatgcttatactcagaaaagcctctaaaattccatttccatactaaactattttaaattagccaaccaacgtgtaaaataactgtcataatctaaaatactgccataatcaaagacaaatgaggagagatactgtggataaagtattattcgttgaagacgataacgatctaggaatggctattgagtttactctaaaaggagaaggacttgaggttataagagtttctactgtacaagatgcaaaagaccaatacgaaaataataaatttgacttagctatattggatgttggactaccagatggaaatggatatgatttatgtacctaccttaaaagaaaaggtgatatacctattatttttctcacagcactggatgaggaggctaatgtagtaatgggccttgatattggtggagatgattatataacaaaacccttcagggtaaaagagctattatctagagtaaaagtacaattaagaaaaaaaattaaaacagcttctaatactatattgaggtctgaaaatatacaccttgaagttgaagcggctagagcttttaagcatgagaaaagtataaatttaacacatttagaatacaaactcttattaacgttaatgctaaatcctcataaagtgttacaaagaaatgagatattgaaaaaaatagtagatgaaagtgaagtgtttttcgatgaaaacactctttccgtttatgtaaaaagattaagaagtaaaattgaggatattccccaaaatcctaactatataatcacacaaagaggtgttggatatttttggaataaaaacgtcagtaaggagtaatttaatgataaatagagaaataaaaattaatatacttacattagcattaatcgcttttttatttattatatatcaaggtatcacagttcatattctatatgaccatttaaagaatgattatattactatttggagtgaaattaccgggaaactaattgcacaaaacccagaaaatgaatatgaaataatacaagcacttacaaatgatacagcgaataaaaaagagtattccagtgatggagaaatgctattaaatcaatatggtctatctgctgaattagactcaagactttttccttatttaaataaacatatatctcaaaacaatatatacatgttccttggagcaatagggttcagcttaatcctaatttttctaaattacttacaatataaatcttttttcttaaaaattagaaatgtaacagctgcagcgaataaaattattgaaggtgattacaccattgatatcaaggaaaatagagaaggagatctagctaaacttgctaattcttttcataaactgaaaaatgttattagaaaaagtatgcataatttaatggaagagaaacaatttttaattcaaactttacaagatatttctcatcaactaaaaacaccactctcaacactaacagtgaacaatgatatcttattacaaggtaaattaaatgaacagcaatatcattttttacacaataatgatgttcaaatttcaagaatcagctttttaatacataatttattaaaagtttcaaaaatagatgctagggcaatactatttgaaaaagaaaactctgatattattgatacgatttatgaggtcattgctagtttgaaaagtaaattaaataaaaaaagtatgaacatacatttaaaagccaatgaaaaaacattacttttccatgacagtatttggatgcaagaagctttattaaatattttaaagaattccattgaacattcaaatgataatagttccatttatattgaagtcacaaactcccctattcatactgaaattataattcaagattttggtgaaggtattgcatcagaagatttgccatatatatttgatagattttacaaaacaaaaaattctaataaagaagggtccattggaattggcttagcgctatcaaaatcaattatcgaagctcatcatggatttattaaagtagaaagccaaaaacattcattcacaaaattcacaataacttttatgaaatattaacagtacataaaagttattataaaaccctaacctttgagtatattttttaaaaattaatcatctgttaaaaaaagaaattcgattaatttttcataaatgactgtagagagataaatttttcctttgggggtaattaaaaaccttagcttgatgtgcataggatcaccatatcaaaaaaggaaacttgtacgtttggacacaatttagaaacaaaatatccgattccttgtacgttaagggattagatatttattttactattttatattgtgtacaatttcttgcttatgaggtctgtgtggcaaccgaaccaaatctgatgataagtattagtggacatcaaaaatagtacattaatataattgcttttattaattatacaagtctacctgtggcaatagtctcaggtattttttcgttcattgtgtttgtttaatttgttattatattttcttaataaaaaataagacacagcccaaatcacgacagcgcatactatagttcctatacacttaatcaaaatcatttattctcaaattattaattactttgcttcaatacccattctctttacgaaaagtatcttttccattcatgaagtcagctgtattaccaggaatgctatacttcatattctttttcttagcttttttcttcaccctcttctcttctacaacagcttgtaaatctgccttccattgtttaaacaaatccatttcacgacacagcgaatttgtaccccttggtttaaatctgaatcaaataactatattatatctatttatataatcgtttaatataaatattcatttttccaaaaaataaagagcacctgacgatttcaggtgctcaaatatatgaagtggggctaccccattctctaatatatgcctgtccttattaaaaagtgcaaaaaaagggtacccttcaacaaataaatatggtgctccaaagtttcatctcacatgataattcgtcccatgaattcatcatatgcttgtctaattagaatgttcactggttcaatgcggaatttctttttaacttttaacaaattaaaaacatccattttggatacttaatgtacactaatattaatattgaatagctttattgatagactgtctagagcaaaaaatatactagctgaaactgatctatatccaatattctttcctgtaacattgatagtaatctccgctaaatgggttcgcacatcatctctttcaaaaagtttatcttcaaccttttcgactattgctacattatccacttctttaaaagttttcagcaattttgtttgaagtaaagtaaaatcgaaattttcacctttaaccacatcaaatttaatctacatttttaactagtaaatatatttatataaatatatttttgtatattaacattaaataattcaaaggtcattctttattaaaatcccctattgcttaaatttgttctttattttcacataaggtacgtgaaattttattatctcattattgaataggagaaacttgaatagctagtatgcccccaatctactctgcatggttccactatccattaagcctttaataatttacgtgtcttatctatttcgtatgtgtgttaaccagttcgtttgcaaacttgttagcacattttttatatttcttctatatatatttcccttcacaaacatatcatactttcccgctaactcttccagtttcttttctttgtatttggtatgtataaagaaatgaagtattattatttttctatgtttttttattctaaaaataccttttcgtttcatgaggcttcattttatacatcatattaataggagaaaacatacatgttaccatttgaatccatattcaagaaacaaaatgataaaaaagactaccataaaaacccactcattactagaaaaaatacataatataattgcgaacgtataaaattcaggtatattttaagggggaaaattatccaatgtcaaatgaaccgtgtccaattattgctccgtgtccagttgtcagtcaaacacaaacacctttatctaatgcaccagcagaacctattgttacggtaaatcctataattaaagttccagttgttttagcggagagaacacttcaaattgttgtagaagcagatgttccattagatccaccggcatctgaaattaaacgtgttctaaaaaatgtatttttaacacaaggtaaattagttcctgtagcatttactccagtagaaggtacgccttatcgtcgtgttacaagagcaaaattatttgtatcaggttatattcgtaaaaatattgaatatgcatctggtgaatgtaatgcagctttatatgatcgtattgctaatgttcctttttctggatttgcagatttaacagaaggtgattttttcactttacctttaattgcagcttcttcagatacagcctctcattttattaatcctaaggatggcgatttacctcgtttggataaatatttcttcgaaaatcatgtagtttataatgagcaacctactgttgaaataatcagtgctaatttttatgaattagatttttctccatgcccaacaacgttagaggcaacatttgatgctttacgtgaaaaaattgtgttagatcttacactaaaagtgttgcaagtacaacaagtacgagctggtattgtttaataaatagaaaaagacattaccttctttatagaaggtaatgtcttttctgttttgataaaacatacataatattaacaatgagtgtatataactgatatgggtttagttataaattcatcggatgggatgtgtgttactgatgaataagccatggtctggtaataatatggggcataaaatttataagattaaaaatttaaatgagcaattagtttcaaagaaaaaacaaaaaaaagagaaagagaaggagaaagagaatgtattttctgaaatgagtcaaagtaatagagtaaattccatggtggtaaaaacaccgttttctgttgtgtcagaagtaactaattttttgacaaatcctattttgagtgaaagaaggcaagaagtgtttcaatttgaaaataacaatattaataatgaatttcgtgaattagagacacaattaatagctacctcaaattattattatgaagagccgtattgtaaaatggtttcttctaagatttttgaaaatagaattcttttcgaattggatttaaagaaaaatacaagtgatattccaagaataaataaagtagaatcatcatgggttcctatacacaatttcatagtaaagaaaaaagaaatagaatttgagaactatataacaggtgaattaccaattgaattgggtagatataaaacagaaattagcttacaagaagtgatagattttaagaagaggattataggttttcaaaacatttcacaagatgttattttaactgaaagtaaattattgttatcaaagagaacagagagagcaaattcaatttcaaaagaaattgtaatagataaaggtactttatttgtgaatgggcatattcttcaaacaattgaatgtcttatagataataaacaatctggtgataatttttattgtttaatgcagaatatagagttggaaatagttattaagattttacaaaaacaagagctgtccaattgattgaagtgcaccccaattgttagacacagtctaacaattggaggtgcattttttatttttacaggtctctcatgaaagtaaaaaaattaagtttaaacatactatacgaggagcggaagtgctgaacataagtgctgaacatttttcaatgacaatgattcaagccttccaattatagtgtgtacaaataattacaattcatacaaagaggcaggtgtaaattattcatacattaaaattactttattatagattgagtgtattacaaagtacaaagagcacttttcaaaagtgctctttgtaaggcgtacattaaggacttgaaagaggcatcattgtcaattcgaaaggagatatctatatacaacatatgaagatgatttgaaagggtgacgataaaaacaaaaagaccagtaagggtgtaccgattgctcagattcaaggaattggagagggggatttatattgttagggaattttttgaatgctattccattatgataaactatgcagatgaataataagagtgaagttgtaaatttatcatctatagtgtaatcttcaccatttgaaataggaactcttaaaatgttatcctgagaaactagatgcgatcaatcatgttgataatcaagtgcttcgtcctttgtagaacctggggaggcatatgccgctgtaattcttcagtaaacgtaagcatttaaagattcataaagaaatgctatcccttcctataattctatagaaaggataacgttttttgctttatgggtcgtataaaactttagcttgatagcgctgtgataatgccccgtttaaacaaatttcccttttccatactgataatgccccttttttagagtcatcctatcagcatgtcgaagattaggagattacttgcaagagtcttggaattattgcaaccgtgctgtgttataattctaaagtactgacatttcatgtaggacttatagatgtcggtttgacatatgaaatgtaaaatcaatccgtcattttgaaggttcaggctaccaatatttaaactattattcgaactaaaagaagtacaaggaggaaggtatatctattaagatagtgagatatgccaaattagaaatgaatattaaatttaataaaaaagtagtagcattcacggcaggattaacggtattatcttcaccattggtatcgtttgcagaggaacaacaatcagtaaacaataagcaatctacaagccttcaagtgcaaggtaacacagaccaacttcaaacaacaacagatgaacaggctttaaaaagtattgaagctagttttgaagaggtagacggacgtggtggaggtactgtcgacaataggaaagtagatagtcttcaacgttcagaaggtattcatgaagaaacaggtacattaactgttcctaacaattcaaacagaacaaaacgtagtctgtctcccatatcacctagcacctctagtacaataaacggtgttccattcactgaatggattgttccagcaggtaacgataatattcgtcctcaaaactacatgagtccaaagtatattacaattcatgagactgataatacaagtgtaggagcaggtgctagaaaccatgctcaatacctatataaccaagcagtaggtaacacggaccgtgctgcatcgtggcattttacagtagacgataaagagatttatcaacatctaccattaaacgagaacggatggcacgcaggagacggtgatggtccaggtaatagagaatctattgcaattgaaatcgcagttaacagtgacggaaactacagtaaagcagtagataacgctaagaaacttgtagcttatttaatgaaagaaactggtgtaccgttaaataacattgtaaaacaccaaaaatggagcggtaaaatctgccctgctaacatgattaataatgggcaatgggatgtattcgtaaatagcgttgagggatattataataatctttatcaaccaaaagatgacattacaggaggttggtatgaagaagctattcgagagttaaatagaaggggtattatgataggggaaggaaacggagttttcgcacccaatagagcgataacaagagccgaatttgctcaattaatctctaaatctctaaacctgccagctggagatgcttcatttaaagacctaaacgatgcaaattcaactttacgagatggtattaaacgtactgcaagtgcaggtatcattcaaggtagaggagatggttattttgacccaaacacacctattacaagagaagaatcagcaattattgtaaacaaggctttacagtataaaggtatatggggaccagttgtaaacctaccattctcagacaaagaccaaattagctataaagaagatgtacaaagattgtatggcttaggtattgtcaaaggtaagggtgaaaatcaatacgaccctaaaggaacaacaactcgtggtgaaacagcaacattcattctaaatatgctacaagtaattgaaaatggcagtgttgaaaaggtagttggaacagctcaaattaatggtattggggtaaatgttcgaagcgggtcaggtacaaactattctattgttagaaagacaagtaaaggcgaaaaagttacagtatatgaagaaaagaatggttggctaagaattggaacaggtcagtggatttattatgactctagttatatcgactataacagattataaaagactaaatacttaaaagaacaggtcatatttggatatataacttaatctcaggttgtgaagaagactttcttcacaacctgtttttgtgataattaagcagaggtcactatacatacccatccagcccatattatgaaataccttaaaacgaaaaaatgagctgtattgttacaagttagcacaaaatttcgttctgagggtactataaaaccttcgcttgataataaagagataacattaactttgttgcctagaattgcttgtgctagatgtgggtagattcgaaatttataggctttattaatcatcacttgattcatcttcatttttgtaggtgtctccttgattaaaatgataaaaaatgcaaaaagaacttgtaggcatcactacaagttcttttttagataatataaaaaggtgaaacaaactatctcattactcgtaacagggaaactatcttacttaaggcttggtttcattatataacaaatattaacatgaagcgttttaatgtgtgaaaattatgtgaattagcaaatgaaatttcatctctattcgttttttaacacctataaatcaacgttgaatggataaacaatatttgctaaaataatattataataatgcgatatacagcaatttatataatagaaagataaaaaatttacatatcactaatttaacgcttagccgttgattaatggagtaaggtaaataacgaagtacatttaatatacaattctttacgcagcataagatacgtaattaagacatttgatagaaatagagtgcgaataatgagaaagatgctgacttgtgggttacactgatcaacttgaaatgttataggggtgtacaagtactacagccaaaaagtgatctgtaatgaatatcgaagaggcttacgcaaagttatatgtgagtctatgtgcgaaggaaaaggataacgtttataggaggaagcatgagggggcaatttaatatatgtaacgggggaataatattatgaaatttaatacgaaattattaaagaaattacttgtattaagtgcaacgtctgtatcaattttcagtgcctgctctgcaaaggaagatggggattacaagccatataaggaacaagactctatagaagtcgcaaaggtcgaagaggagaagactaatccccctaagattgtagagaagaagtccactctgcctaaggtcaaagaggatacagaagaacctaagaagaaaaaaaagctacaacaagtggaggaatctaagaataaagatgaggaaattaatgacaaatatccgcattataaagatgtacatgaggacgcatcaacagtatcactagaacagtataatcaaatcaaggttggaatgcctgcggacaaagtcatagagatagcaggaaagcctggatccagcgaaacaactaaattgttctctatctacatatatttaggtcacggtggacacggttcgatgactataaagtttgattctaatagaaatgtaacgaacaaagagcaagatggtcttagcaatactgcagttaaagatgagaaggctagcaaagaacatgaagaccctaatcctgaatctgttaagaaatctagtgctataattccaaacgatttttgcggacatggacatgacgaaacgaaggagctagcgcacgactgtgaaaaaattactgataagaaggcatatagaagatatcaactacaacaaaagagagaagagcgaaaaagacaaattaggggcgaagaacaggaattaattgattacgatcagggggatgcagcttacaaggagcagcagcgtatatacgaagaaatacaacgtagaacagaagaaagggaatcgattgactacgattacgatcaaattagagctgttaacaaagaaaggcagcgtatgtacgaagaaatacaagagtgagatgaagaaaaagagtgtaaagtgtaaactaaaaaagctaaatggtacgaggagtatatttcatagataggaatttgaattattgaaaaatcaaaatatggaagagtaaataaaagacgctagttggcgtcttttatttatcattattagtaaaacttcactggtgattactattaatattataatatttgatcttggaattaacttattagataatgcgtattgattgtataacatctgacaaatgactaaagataataaaaaaattcttgatacgaaaatctaaattgtataatatataggtatattgttatttgttgaattccgtttattcccacgccttatgtgttgtggttgagttgcagaagcaagttgtgttcttgtttcaattttgaaagggcttctttgagccgattagtgcatatatagcttattttgttatgcacatttttaatcgacttgaagaagtcctttttatgttgttttcaagttgcaggtgggattatttatgattcataacaaaatgaaataaaataatgtttgaatagtattagtagatctaaaagagtaatctaaagagccggatgatatattgattgatatagataagttattagggagtgcaaatgaagaactgcgatataaatcatgtgatggtagtttatacaggggaaaaggaagaactaagtgatatgaatacttggagcttccttttttattgcaattagaaatctggtagatgattatgcatataaaaatgatttggcggaaaaattttatttaatttcaatacatagaagaaaaagaaaaaaacaaattcgtaaagggctagtttaagtacgattcatttgaataattgagaggggaaatgtattggtgaaacgtcttgtttcttgctgaccaagggaatgcaggatgattagtaaggcgtaagagcgtattactactctcacaaaggaaattacattagaaaagggtctgtcagtgtttacaatttatttgttacatcggtctaaaagaatttggatggagaagtaaatgctaagtgagaacatgaatgacatttctataacttgaacaattgtgctttttgttaatagtgaaaatcagaagtagaagaggcacaagcgttaaagtggactgcaaaagtgacagaaagagaacaaggattaacattatttataaagatatctaataagaagtgctatcggatttatacagaaggagggataataccagaaaatatatgaatgtatataaaatttgaggtgaatccacctattttctatacattagttgaatcaaacaatagatgactagggagtgtataacatccatttcccagttaaattttcttagataaatagcatgaaatacagtatgttctcactcatttgtataaggataaaatagccttttatttttatgcaaatgagtgaaacagaacgattcaccatataagaatattcgactataatgaaacactgtacgtcattgtaatattaagatgttttaagattaaagtgattattagtcataaaatatgagtttcgagacctcagcaaaatattgcaatgctttatatacatgagattgtaaaaattattttattaaaattactggaggctgatgaaatatgataatagatcatataagcaacaatgtagtaaaaaaattggaacaaacggtgcgctatgaaaagaaacaggtacaggtattacgtgtaagtaaaagtagttctaatatgcacgcttacatgattttcccagaattctcagaggttaaaatttcaaatactgaactggatgaatatatagaaaatctatcaacaagtctgaaatatgtcattgatcgcaagttaagtctacaagaaattgaaaaacaaaatcattctttcattatgacatgcgcagtcgaggaagatggtgttatagatgatgaaacgattcattttaatacgacgtatgttaagccacctacacttgcgagtaaggtatttaagctagtgtgtggtttaggaaatcgtttgaatagcttaaaagagttacatataacagtattaaataataatattaatcgaattgaaatagagttttataatgaaaatgaaacatatgtagcagtagaaaaagaagaaattgcaaatgcgattatgggggcatatacaaaagccaatatctattattccgcagatctccgttatgttgcagaaggaaatgaaatcaaattaaagagcattaagccaaaattagcgggtgatgtgttgtgaagcgagaaaaagggatgattggagttttatgtacatatgtttttatgatcctagtactcatacctttacatacagctcatgcatctgtaaaaatggattttaatgaattgaaaggaaatgatgtttcttcatcttttaacgaaggattaaacaatcgaacaaaaacgacagagaaagacgattcatttgggtcatcaattatacaaaaagttgagggtatgtatgcaccagcttttaaagtaggggtaaatatcttttctatctctttcatattaggtgttattgtcatggttatggggttaattacaaagaatggtcaatggatgaaatgggcaacagggagtatgattttctcgttcgttagtatgatggcaatgagattaagtgtatatttcttatttagttcggatgtattttcgtttatgaacatttttacggattttttagacctgtttaaagcaacagcacttatttttacaccctttatgttaattgcaggaattcgtttacgaagaattcatgagagtacaaaacaacctgagtattatcgttggtctaatcgcgttataacgggatcttgtttactatgtatgttagccgtactggctccatggttatttgcgaatatgtaaagaaatatatatagatgcaaaaggtactgaatgttcattcagtaccttttatctacccatctgatttttcctttcatattctgcaaatatctcctctgatataggggataatttgttcgatttttaattgtttttcgttgtaaattatttccatttgtagaatgaatactcctcgtagtagagctggtatgcctacaaaacagacgaggaagatagaaactaaaataatatttaaattagaaattcatacctcgtatttaataataacttaatttattttgataggagtgcttgttttgaaaagaaatccagaatataccgctttacgtaattctatcttgataggttggctgctcacaattattgttatgggcttatctatctatttttcttctattatatatttactaattggatgttttattttgtcattgaaatatggattaatgggcactataaagaatgtagaaaagcgtttgccaacctgggctaattttggagtgattgaaaaaacagtgaatcggagggtgacaagaccgtttcaatttcggggcggactcattgtttcattagcattaggattcatagagatggtgataaaaggtttatgtatctcatattatattttaggattagaaacccatgtatatcgtttaatgcgtagaaacacaagaatgtgaaaaggggacttaaattatgaaagtattaatatttgaattaattctaattgtgcttctgataccgataaacattatggtaaaaaaacatgctccaaaatggaaaggaagagctggagaaaagatggtaaaacgtatagtaagaaaattagatcacgaaaggtattgggtgttacatgatgtggcggttcatacagagtatggtgatacaactcaaattgaccatattgttattgcagaaacaggtatatttgttatagagacgaagaactacgagggctggatttatggaagtgagaaggcagcaagatggacacaaggtatttttagaaagaaacactcttttcagaatccatttagacaaaattataagcacatgaaaacaattgaatgggtgatggaacaacagctgccgtgtatttctattgcagcgtttcatccaaaatgcagcctaaaaagagtaaatgttcattctaaagataaacatgtcctatattataacgatctaaaaaaatgtatcgaatcctatattgatgtgaaattaacaaaagacgaggtcgagcatatttaccagactattttgcaagcaaatattactgataaggatactgaaaataaacatgtgaagtatttacagaataagttcgctaaacaataagaaacggagcaaggaacaatgttatatataataggatttttggtaatcatcgtagtagttattcgtcttaacgtgaagtattaccagttaaaaggtaatccaaaagattttgtgatgaaaaagaaggattaaggatttattttagaaatagaggtaatagaatacatatattattttagccatcaccaaaggtcataagaaccgttttacgatcgataaatacatacattactatattttattaatgaatttaagtgatataataaataaaaataaacaggaggtttagttgtgaaagaagtgttagatgtagaaacgtatttaaagaaaatgaagaatcagaaaataaattatgataaagtattaagaaaaatgattaatgattgggaagcaaggaacgaaagaccaaaagtgttacttcattcatgctgtgctccttgtagtactgcttcattggaatttcttgcagaacatgcagatattacggtttttttctcgaattcgaatattcatccgaaaagtgagtacatgcgacgctctaatgaacaaaagatctttgtagaaaagttcaatgatcgtactgggcacacagtaggatttcttgaggatgactaccgttcaaatgtattttttaaaatggtaaaagaagaaggtttggcagaagagccagaaggcgggcttcgttgttcagcttgttttgatatgagattggatcgttcagctgaggtagcacaagaaaaaggttttgattactttgggagtgccattactctttctaaaaataaaaatagtcaattaataaatgaacttggaatcggtgtacaaaaaaattatgattcgcgttatttaccaagtgatttcaaaaaaagtaatggatatcaacgttcaattgaaatgtgtaatgaatatgatgttttccgtcagtgttattgtggatgttcatttgcagcagagaaacaaggtatagatttaagatcggtgaacaaagatgcaatacattatctgaaagaaaataatcttagtttaaaaaaatagatttaatggagagaaattcgatgtaagattaacctatgatttacaaacgaaacgcattatgtttctaaaggaaaaacgtaaaaagctaaaatagttcgggaataactccttactggttaaagttctagagaagaaaaaaccaataaggagtgttttcttaatctcgcattgcccctgcctctcgggaagtcattgctccttgtcctgctcttacatcattttgaatttcttgtttcactttttgtgcatctgtttcagcaaaatctggtttcataacagaaccaggactttttatagattttttacgatcttgcatacaacccctcctcgatttaacatttaacaatcttattatttacaaaaatacactcggtatactccgagtagtataatgtttattgaagaaaaaattgattactataaggtgatagaggaacatagggaataacaatcttgcattaacatctctctcaaaagtttagagaaatatctgccagaaaaacgcctttctctctgtagaaatataaaggaagaatagtgtttttttattttggatacaatagtctaattatgcaaataaccacttgttaaggttattagtaaaagtgggatccaagaatgactaaatagggaatctaatagatggatatggaaaaatttaattcaatataataaaaaacctttatttaaggcgattagacttgctttaaataaaggttccatcaaaaaatcactatcaattgttagtttaaaaccaaattgaagtgtatatattttattgggaaatcgctttatagacatcaagcaaaccattaccaaaaaaacttttattagtaggggtatcattgctaactccatttttataaagatatctcacggccttatctggattttttttaaaattatttttatcaataattaatgctaaagcacctgacacttttggagcggcaagtgaaacccctatagagagagcatagccaccaccaggggcggtagttaatattagttcttttaacattaacttattttttacccactgttctaaaccatattgctgaaataatctattatctcctccaggtgcagcaatatctataaaactttcaccataatttgaaaataaggagagtaatttagatggaccaacagatgaaactgttactatatttggcaactcagcaggaacatctaatacttctccagtaaatgttatcccagtattttcatttttttttctaaaaaaatcattcatttcctgcttgttagtaacatcaagagcatcattaccagccgcagcaactatgatacttccctttgatttagcatatttaatggcttttctataagctttaatttcggataattcctcactagattcaccgtctgaagaagatactataccattgatgaggtattcgcctaaacttaaattgataacatcaacattatctttcgcagcttcaactatggctttaataacccaaatagcctcacctgctccattaccaaacactctatacattttaattccaataccaggagcaacccctttcataaaaccattagctgcaacctgtccagcagtaaaagttccatgtcctcttagatctattaggcgatttaattcacctgtttcttgagattcttgctctctaaatccacctttaggtactaaatttttagatccaggtgaaatgttatcttttaaatcaggatgatttatatcaatgcctgaatcaatgataccaacagttacatttttagttcctggatatagtctatagctatcaccattatgggttacttgttgcatatcccattgattctcccatatttcatttaagggtaggggggaagagacattggttgctacttctcttgaattaaacgattgtaatgacttattatatgaatctatattaggatccgaatgaacaatattcattgctttttcggtagctttcacttgtataacaccaatctctgggacactatagactacttgcatatcatatttttgaaacttactagctagtttttggttattttcatagttcttcaacattatagtataatattgtgatttattttcagcatgaactgtagtaataggtatgaaagttccggaaatcaagttaattaacaaaaggaatttaattatttttttcataaaatcacctcttgatatattatgtataatccttagtttactaaatcgttaatgaaaagagatgttaagggaattagtgatttgaaaaatttattcactttgatatcgataaaatgtattttaggaataagttcattagagaagagaattaaataaaagggaatgagtaattaaatatataaagtatttaattactcattcctatgatttcaaatttaaattataaatctttttttgcatatactttcagagatattatcattgatataaaaccaataataattgagatgaaacaaggcatccatgttaggacagttggtgagaatggaaaaatacttttgaaatcaatatcacttgattgtagtccccttataagagtaggagcaacaaaaggtattaaaaaagcagttaaaagtgatatgattttggttttgtcataaccaaatttaaactgaacaggaagtagtacaccaaataaaatacttagagttaaaaaagttattccaagagcgctagcgctcaggctttctatacccgatggtgcgacaactgaaatgattatacggataatagctgcacaaataaaaattacaaaaagaaaaaggtacttcgcttttacaaatgcgcttcgtgtgtatggggtagcacaaagtaaagccgctcccttgtactgatcctcaaatttggataccgttccgaacaaaatatattccatcaaaataacggttaaaagaaagctaacaagaccgccatcgtttaattgtaattgtgaagaaagataaataggagctatagcagcaaaaacgagtaagattagaaaatattttttgactaacaaaaagtctttcatcactaggttaattaacatggatgttccccccaatatatgaaagcataatctcctcaatagttggtctttctattaatacatcaggcatgagtcgacgtacatcatcttttttattagtaatcccttcaaatccatagtgagtttgatgtaaatttaaaaaaagaggtcttgtttgtttattaattaagcggttgtcgccctttaccaatgcatgtgtatctattaaaacatctttttcatcatttactaaaacttttccatcatcaattaaaataatcatatcagcaattttatctaaatcagatgtaatatgagtggaaaaaaatacgcttttccccggctctttcatgaaatcaaggagaatatccattaattcactccgtactaatggatccaagccacttgttggttcatccattattaatagatctgcatgatgggatagggctaatgcaactgcaaatttcattcgcattcctttggatagagtagagattttttgttctagatttaagttaaactttttaatataattttggaaaactgtttcatcccattcagtgtaggatggagcaataacatttttcatttcctttactgttaattcatcataaaaatagccctcgtctagcacaataccaattttgtttttagactttctttcatgcttatccatatcttttcctagaaaattaattttcccagaatcttttaaaataagacccaaaatcgctttaattgtagtggtctttccagaaccatttgtaccgataaatcctgttatacagtctgtattaagtgaaaaggtaacatcttttaacgaaaaatttccgtaagatttatttaaattatttacttctaacacaacattcatttttcattctcctcctctaaaattaaatctaaaattgaatggagatcatctgcatgaatacctatactacgagccatttgacaaacttcagtaagtttaacttctaccatccggcgtttggactccattaacaactctaaatttgtaggagctacataggtcccttttccaacctttgtaataataaagccttctgtttctaattctgcataaactctttttgtagtaagtacacttacatgtaagtcgttagcaagtgagcggattgatggtaattgttcaccctcttttaattcattgttaaatatggattccttaatttgctcctttatctgttgatataaaggcagacttgatacattacttaagactattttcattaaacaacctctctatcgataagtgttatgttatgtaatgcacaccatacacaccatacacagttaacattataaattataaaaagcagtttaacaagatatactgcgattaaataacttttcataaataaaatttttagtatcagttaataaagatatttgttattttaaataaaccaaaaagaaagttttgtaaatatatgtcacaaaatattaaagaaacacacacaaaatgtttaaaattttttgattgtttttagaaaacatagggagttatactttagtcgcaccacacaatacagaaaagggggtaggtcaaatggaaacaccagtagtacaaccaagggactggacttgttggagttgtttagtatgtgcagcatgttctgtggaattattaaatttagttactgcggcaacaggggctagtactgcaagctaatatccttttagaagttttttggttaaaggtactaagagaatgagcacttttggtcaaatgaattttctagaagaaaaataaataaccaaaaaggagatgttctaaatggaaacaccagtagtacaaccaagggattggacttgttggagttgcttagtatgtgcagcatgttctgtggaattattaaatttagttactgcggcaacaggggctagtactgcaagctaatatccttttagaagttttttggttaaaggtactaagagaatgagcacttttggtcaaatgaattttctagaagaaaaataaataaccaaaaaggagatgttctaaatggaaacaccagtagtacaaccaagggattggacttgttggagttgcttagtatgtgcagcatgttctgtggaattattaaatttagttactgcggcaacaggggctagtactgcaagctaatatccttttagaagttttttggttaaaggtactaagagaatgagcacttttggtcaaatgaattttctagaagaaaaataaataaccaaaaaggagatgttctaaatggaaacaccagtagtacaaccaagggattggacttgttggagttgcttagtatgtgcagcatgttctgtagagttattaaatctagttactgcggcaaccggagctagtactgcaagttaaaattttaaaatgtgagagtgtttatggtgaaattaaattaggacttattctaatgacaaacagttatgttaagaataagtcctatatatttatcgaaaacgagtatgggatttttgtaatacataaactaaaaacaaatttaaattttataggagatgattaaagtgaatggctatttattttggaaagaaaagctagaaataagaaaattcacatcaaattatgaatctatgttggtagttcataaaaacccaaacgaaagcgctcctacgcttaaaaacgaaaatacatttacgataaataaaaccgccactgaaattattgagttaattgatggtactaaaacatatggacaagttgtatctttcttgtctttaaaatacagtgaagatccaataagtattgaaaagaaattaaatgcatttttaaataatgtatccaaagtttacaatatgaacattggtacgcaagaagaacctataaatgtaccagttaatttaattgaagaacagactatatatccaaaagtggcttcaattgaaatcacaaacagatgtaatgtaagatgtcgtcattgctatggagattttggagcagtaaagccaaaagtaatgagcttagatcaaataaaatccttattagatgacttaaataatataggagtgaaattaattgaacttacgggcggtgatataacagtacatccaaatctaaaagagatattgttatatgcacttaacttggatttttctcaaataacactgttgaccaatggtatagctctttctgagaaagttatggacataataataaaaaataagtcgaaaacatttgtgcaaattgatatgcatagcttagatgataattatttgacttggttctttaaagttcctaatacacttcataaaattaaaaataacataatgaaattagccgaaaatgatgttcgtttgcggatcgccacaatagttacacatttgaatgtgcacgaggtagaagatatagctgaatgggtacataatttagggattgatagtattggggtatctccagtaataccaatgggaagagccttaggatgtagtgatctttatttaaatgaagaggatgttaaaacatatggtgaagcattgttgaaaataaataaaaaatatcctaaatttgtttcattatatgaaggtgcgcgcgctgagattaggaattgtggtgcaataacatcacatattgtgattgcgcctgatggtgaaattaaaatgtgtactatgcatagtttagatgatttgaaaaacagtataggtaatgtttttgaacagaatattaaagatatttatgacgaaaaattcaaatacattaatgcattttttaacttgcaagcacctcaaatggactctgaggaatgtaaagagtgtgaaaataaacgtttttgtagtacatgcttcttaagaagctttataaaagcacaagaaattggcgataaatgtaaatggtttaaaaatcatgtccctgaaataattaaggagccattaatggtagggcaaaattagtatgattggatgagatgaatattgttaagtttctgaggataaaccaatataattccatagacaatgcgtcgggataaggtctcaagatatctatggaattatataaacctcattatattgattcgtaaattaatataataaatagacaaaggaggagaaagagggtgaataagaagataaataaacaagatgaaattcaaatttcttataaagagttattatttttatatccgtatttgaaaaatacaaaaactttgttagctcttggtttaattgggatggttatagcttctttgattatcgcaccgataccatatattattggctacattattgataaagttatactattaaacaaaagctacgatcaattattaaaaacaactcttatactcttattaatttattgtattaactatttaatatcgataggttatgagtatttatttactcgtgtacaacaaaatgtagttaatgaaattcgattatctatgataagtaatattatagatgcgcctctttcttatattaatcagaaggagaaaggttacattcttagcagaattgctgaatctggtaatgtaagtgcattattttctccaaatttattaagggttttttcaggtatattcgattttttctttgctttatttataatgtttaatttaagtgttaaacttacaggtatcatagtaattattatcccaatatattttataatatccaaacattcttctaaaatgatatcaaaaagtaccacaaacgtatacgagtcatcggcagtattaaacgcagaaatgtatgaaaccttaaatggaatagaggatataaaattattaaacggtaaaaatatacaaaccaataagattaagagtaaattaaataatgtaattaaaagtgcgctaaaacaaagtttacattttattttctttatgcaaaatttaatagtaacaaataactttgttacagtaatagtattactggtatcaggtattttaattttacaaaaccagcttactataggggtgtatacttcattttcaatttatatggctaaactccttgcgactacccaagctttaggcagcttagatataactctaaaacccgtgtgtattagtattaagagaattaaggagttcttcaatttagatgttgaaaatacactaggtacaaatataatgaaagaaccaattaattcaatagaatttaaagatgtttgttttaaatataatggaaatagtgatttgatatttgatcatttaaacgtgcaaattgaaaagggtgacaagttattaattgatggtataaatggatcaggaaaatctacctttataaaattattaacaggtttatatcaacctgaaagtggaaagatattgataaataatattgactataacttaatacataaagaaagtgttagagatagaataggtatagtttcacaaaatatatttttgtttaaaggaactatattagataacatattatatggacaaacaaataaaacgaaagaagatgtagttaagttaatgaaaaggtatcatttaacatcacatctcaacagatttgagaatggattagatactataattgtacaagatggttccagtgtttcaggaggtcaagcacaatttatagcctttttaagggctatcctcacaaaaagggatataataatattagatgaagcagcatctaatttacatattgatacaagaaatcttatgtatgagatacttcaaaattacaatctttgtaatatattaattatgatttcacatcagcaagatggcttgtattttctcaataaaacattagaacttacacatggtaataaaagaattgctttaaatggtagtatgctttaatcatcatgctttcatagaagggagcatcctaattatgtcaaaaatgaaacttattaattttgatacatatagaaattcaatagttttatttgagaacaatggcgagattatatcagtgtcagctcattttcaattttttgaaggaagtgaaagctatattcaaggttttattgataatgaagaagttattcactttaaatctaataatcctggtccgaatatttctatatatcgatttgcgcctaagaatattaccaaattaattatatcaagtgaaaatagaacacatggaatggtcacattgtatacttcagaaatatagctaacatctaaattttttaatagttaatacgatgaagtcttggattaagatcgcttgtataacattatttgtttttaaatagcagctatataatcaaaaaaaaggaatcctttattataaggtattcttttttttgattataatattaaatttattatagggtttctttacccatcggcatttaactaaagcgaaattgtaaacctaaaataaaataactttatcctttcctataattctacagaaagaaaagtgtattttttgcaaaatgcatgtgatgtcacgaataattaaaaggttattcaataaaaagcttactgccgcatttaaacttattgaaagtaactaatttagttatatatcaatcaaccacgtccagcttggaaagatggatatagcgacataccaccatcagcaaacagtgtaatacctgttacatagctcgcttgtgaagaagcaagccatgctgctaccgctgcaatttctttcggttctccgatatatcccataggaaccatactttcaacatcggcacgtttttctggatccgcaaatttttcagcattaatcggcgtattcatagcaccaggcccaatattatttacacggattccttttggtgcatattctagtgctaatgtttctgtcattagcttaacgccacctttacttgctgcatagtgtacaaataatggccatggaatttgctcgtgaacgcttgacatattaataacactacctttaatatcatgctcaacaaaatatttaattgcttcccggctccctaagaaagcccctgttaaattcgtagcaattaccttattccaatcacttaatggcatttcatgtgaaggtactgaattttcaatacccgcattattaatcatgacatccagtgtaccaaattcttccacagcagatttaacgagattgataacatctgattcaactgttacatctccttttaccgcaatcgcttctccacctgcttgtttaactacttgtactacctcatttgcttctgattcgtttgaataataattaattacaactttggcttgttcttctccaaaacgaattgccatcgctcttcctaatcctgtggatgcacctgtaataacaacaactttcccttttaaatctgtatacataattttttcctcctttttatcctttagcaattcctaacataatgccagctgcaataatgaagataattccaatgacaatcgcaataaattgtcgttttgttttcttttcacctaatataaaaattccacctaaagttgagatcacgatccccatttgggaaagggaaaaacttgttgccacccctacacgcggctgggaaataaataaaaacatatttcctgctgcccaaattaaaccaggaataatattgtgaatcgcatatttattaaatggttgatgcttaaaggttagtagaattccacctaacaccataccaatggcttgtggtaataacgctgaccatccgtctataccgaataggcggataattaccacatatactaagtaaccaagagttgaaattaataacatcacaatcccttttttgaaatttcctttttgttcatcgtttttctcctctttgctttggagggatgtgagaacgattccgattatgatacaaagaagtgccagaacacctaatacaacagatgttgttgttgaccattcatgaaatacaatgaccccaaataaagtagtcgaaactaattgcatccctgttgaaataggcattgttttagaaaccccaattaaatcaatacttttcaattgattggcttgtcctaatgcccaaaataggccagatataatcccgataattatcaccacgggcgtcaaaacgggttttataaaaatataaacaccgatagaaaaaactagagcgccaagggtagttccaagtatttgactgtaaggaccgcctcctagtttaacgttgaagagtacaatacttccccaaaataaggctggtaaaatcgctaataaaatatccatttttctaaccttcctaaaacatatttattaagttgaatgcttgtacgagatagtatctttgtgtcgagggaattattttagaataagagaagtttttctacccgtaatatttgtttacccaaaataaaagataaataacatcatgttgaaaaagaaaataactagcacgaaataaaaaaggttattagaaagaatatgaccaatacaatttcaagttttgaaaataggaataatggagaaaaacttgatgcaaaattaaggtatgttatacaaaaacaacgcattatgtttatacatgagaaaaagaaataatatcgtaaaatctttaatttcatatataaatttaataagaagtatgatatgatgaaagtaacaaaatacatctaaaactatcttgcaaaaggacacacctacgcatacatatgcgataggtgtgtccttttttatttgtttttaagatttcaagactgaaaagggggatgtatattgtgtaccagtaatatagcatctactaatgtttcttttgaaaaattgaaaagtcaggaagagaatgaaaaaaacatagtgtcaatatgcccgaattgtaagaaacgctcatttagagtactttataatgattatccaaaatggatacagtattgcctatgttgtaattatcgagaagtaaatacaatagagagtccgtttgtttattagatgtagctatttacgtattttgattaggaggaagaatttccgatatgaaaatatgaattaaggctatttgtataacatcatttgtatttcaaatgacagcatgtagcaattcgacgcaaacaaaaaatgattcgagacctgcccaagcagtacaaaacggaatacaacagcacgtaaaagggaaaggtattgttgatattccagggaattataaggggaaattaaaagacttagagaccgttaaagggaaggtattacatataaaagacggagatacaatagacgtaaacgtaaaggggcagaaacagatggtaaggttactgttattagatacccctgagtctgtatctcaaaaaattccaccacaaaagatgggaaaagaaccatcttcctttttaaagaaacagctagaagggaaaagtgtaacatttgtttatgatcggggaccaaaagaagacaaatacggtagaaaattggcttatgtattttgcgatggaatacacatcaacgaattaatggtcaagtcgggttatgggattatagcctatatttctagacctaatactacaattctatctgaaatgaaagaagcagaaaatgaagcaaaagaatcaaaggttggcgtatggagcattaaaggctttgtagatgaaaagaaccagcattataaccgtaaagatgcagcttaacaccctaacccattgcaatacaaatatttgtgcaaaatggaggttttttgaatgaatgaaaacaaaagaaatatgctcttatcctttattatttcaattttatttattttcgcgagtctattgccatttagtaataatgaatatgtgtatgttatctccaaaattggtgctgcagcaggtgtaataaatattgtgatgatgagcgttttcttgtattttcaaagcaaaaaaacgggacatttattaaattggtaattaaagctaaatagttttccttactcatatccttttaagtttggtaaggaaagccgaaaaggagtgtgaaaggtgagtcaagtacctggatttttaaagtttgttttagcgaaagaaagacggtatgtatatttagttgtaggagaaaagaaaaacaaaaaagtacttacacacatggtatatagatttggttcgctagaaaaagcattagaaaccatgtacgaaatgcgtggtgattttgaaaatcttttccctctagaattaaaagagaggggatacgactgagaagatatcaatgattggatactttctattgaaacagggtactcgaaacacggaaataaactagtcatatactagcaaatgttttgtattttaaaaaataggtgaggcgaaaataagatgttgatcattcaaaagtatcacattgtaattgcttggacgatagctactagtgcaatgttaattagtttgttttttagtgaatggatgaagctgccgccatgtgatttttgctggtaccaaagaatggccatgtatccattagtattaatatgggggtagggatatatagaaaagattcgcacgtaagcacgtatgcatttccatttgcgtgtatcggtttaatgttatctgtatatcaaattacaattcaagcgtttcctaatagtgagatgcagatttgttcagtaggagtttcttgcacaaaagattacttaaatttattcggtttcatctcgatacctatgctatcttttgttggatttttagctatcataatacttctatatattaaatctgagagagacaaaagaataaacaatacagcgattatgaacaatatgctcgaataaacaaaaaatacctataaatagataaaaatataaagaaattaaaaaaggagaaataaaaaatgacaacaatgcaagtaagtaatgaaatgtacaaaattccagaggcagatatagaactattaaaaatcatggcccatccagttagattacaaattgtgaaggagctagaacaccacaaaatttgtaatgtaacacagttaacagagctattagatgttcctcaatctaccgtatctcagcatttatctaaaatgcgtggaaaaattcttcgctcagaaagaagaggattagagatgtattatcatattgtgaattccaaggcatgtcagattgtcggagtattaggtatttaattctaaatcgaaataggatgatagaaagagtgttgttaaatatagctgcaaaagatgatgtactgcagaatgataaattcacaagcttaaagtttagtccttctaataatggaggagctgactgtggtgaaaaattgatatagaggttactaaaaaagagtgcagtacatgtctgcattctttttctttgtgccatagctataatagataaagtattttgttttgtatgactctgaataggggatacagtgttttgctatgcgaaaacgatattttcgactttttaagcaaaggggataattagtttattgatgtgtatagtatgaattaaggtttagaatattctgtgtcaatattatcaatttactatagtttccaattatgtaaaaatagaattgattataattttccgtaaatattagattgaaaactattataaggggaatgtgagtatttatagctgtttataaacgatgattggggatacagacaatagggtgatcaagtactggtagaatttatcaaacaaaatgaggtgactttaacttgagagaaattgcaaaaaaagtaaaaatgatacgtttacaggaggagcattccgggcttaaggcagacgcagaacagtattcttccaagcgatgtaaaatagaaagagagggtattaatttagaaaaaaatagagttaaaaaacgaactcaaaaatttcaaacgtcagaagaaaaatgggacataaaatgtaaaaaagcagtacaattatttaatcaaggagaggaatatccaactattgcaaaaaatctgaggtgcaatgtgagtagtttgtatagagaacttaagaaacggggcacattacaaacaccaaagcaggtagcagtatctaaatcattaaaatcacccataacatcaacacgaacaaaaaaaacaaactttgagagatataaagaatattatatgtacaaatagaagaattcatggctataaatctatacttaattctttagtgttaaaaagctcagattataaaaggtacaatgaaaaaatgcatgtttagcagcaaatcttcttacagtattgatagagcatctttttattttttaggatatttttaaatctaacaaatattgaaggctattacctgttgcttagatcaaaaaaatattcttaaaactaaatccttacttatatttgttgagtagttggttaagaagaggtttttttgcaaatgctaaaataaggatactttgtccaaagcaaaagaatccccatgtcataaaggattcttttaggagagttagagagatgttgtcacttgactcatattgattttacgataaaaagaaagaatattcaaatttattatatatttctcaatatatttcttttatttttatattataattaattctttttattgatgtatatctttctgtggtgaatccttttaataaggattccttttttagtggctcatatattaataatgagccactagagtttaagatagtttatacaacaactattgaaattgcttgattataggggaattgttgatttctattgctggggatcagccctgaaaatttatctacagtaataatgattacaggtattctaacttcgttgattagaaaatttgttattactctttttaaatattttaatctttttaagtttctcttatagatgtaaaaggtttggtgtaattataatgtttttaacgaatttccggaaagaattctccttcctcaagcgtgtgaagggcgtagcccaacggtaggtgggagatgaatttcggtttggcgtagccaaaaggttttcctttttattttgcctctgatataatcagtcttataaattataagggctggtatataaatgaaattagcctttgataactttaaacgtttatattttttagttgacatattaccgcaggtctaaataattaagtttggatgatgatgagggaaatgaaaaataaaaaatccctcttttcatattgagaaagagggatttttacgtacaagttatgcacccgtatataaacgaagtccctcattctatctttcaagcataaagcttgcaggaagtggcacagtattcaaaatgaacctgttgccgaggtttcaaagggccagtccctccacctctcttgatacaatgagtaaacgaataaattttattaatttttgtgtttctttgataattcaaaatcttacaccttgaataatgaagtgtcaactaaatgaaatatagtttaaattttcagttttattaaacgaaaaaaccactgcatagggcagtggtttttctactagaagttaaagttatctggatctggaccaacgcgacgatcttcatttaaagcttgaattgctttcatatcatcagcacttaattcaaagtcgaagatgtttgcattttcaataatgcgatgttctttaattgatttgggaattgttacaacttcgttttgtaaatcccagcgtaaaataatttgcgcagttgatttattatattttgtcgcaatttcttgtaacgttggattatctagtagttgtccttgcattaatggtgaccaagcttcaagctgaatattatgttctttacagaatgcatgtaactcttcttgtgctaaatgtgggtggtattccacttggttgaccattggcttaatttcagcaatttcaaatacgtcttgtaagtggtgaatgtggaaattactcacaccgatagcgcgaacacggccatctttataaagtttttctaatgctttccatgattcggtatatttcccttttacaggccaatgtactaaatataaatctaaatattctagacctaatttctctaatgtagtttcaaatgcttgaagtgttgtttcatatccttgatcgctattccatacttttgaggtaataaataattcttcgcgtgaaacaccggattcacgaatcgcttgtccaacaccttcttcattttgatagattgctgcagtatcgatgctgcggtagccatttttaattgctgcttttacagaatcaattacttctgaaccatcttctactttaaaaacacctaaaccaaaccaaggcatttttacaccgttatgtaatgttgtatagtcttttaaacttgttaaaatcatattatttccccctagcttttttgtttgttgcttctactgctttttgaattgcctctgaaaaattatattcgtataaagttttgagaccctcagctgtggaaccacctggcgttgttacttgttcgcggaggttagctggattttgcgtttgttcgagcatagaagcagagccagaaatcatttgaatgacaagatgttttgcggtttcttcatcgactccataactttttgttgtttcaattaagctttcagcaaagtaataaaggaaggctggtgcacttccagtaactgcagtaagctgatgaacttcttcctcagtacaaagttgcgaagtaccaataccttttaaaagcagttgcagggtttcttgatgcatctcatttactgattgtcccattgtatataaggagatagattttccaatttcagcagctgtattaggcataatccaagcaacaggcgtgccctttgggagtctagcttctaaataagatggtccaatgccagctgcgactgttacgactagttgatttgatattaacggagatagctcagctaataactcttcatgagcagaaggtggcattgctaaaacaaccgtatcaacagatgtaacatgctgtttccaatctgttgcagtagacacattatatcgatgttgtaactgttttagcttttctacgttgcttcgattagagacgataatttcttcgatgtactctttgcttgttttaagtaatccggaaaatatagcttctgccatacgaccggcaccaataaataaaattcgatgtttagttagcatattctttattcctttctagtagagatatgttataaaaacgatatcatctttaagagaatgttgtaaaaagaaaagacttaccgtagatggaatggataatgagaaggcggaaattcatgctaatattaactgttattaatctctttatatgtgtagctggtttgctagagtggaagagcaattataaggggcaagaacatacaaataattatatctagaaaataattagaattgaaaaacccctgaagcatatatgcttcaggggtttactaatagaatataagattatgcttttgtcataccaagtaatacagcgccgccgataattaaaacactacctagtgcaataaagatcaattgacgttttgttttcttttcacctaagaagacaatcgcaccaaatgttgagataacgattccagtttgagataatgggaagcttgttgctactccaacacgtggtaatgaaagaagtaagaataagtttccagttccccatagtaaaccagacaaagcattacggattgcatatttgttaaatggtttatgtttagacgtcagtacaaccgcaccaacaaacataccaactgcttgtggtaaaatagcagaccaaccatcaatattataccaacgaataataattacatatacaagatagccgaaagtagaaacaattaaagtaagaagtccttttttcaattgtccaggtggctgagcattttctttatcatctaatgatgtgaatacaacaccaactacaattaataggattgcaatcgttcccagaatgatcgttgtagtagtagtccactcacggaaagcgataaccccaaagatagaagttgcaacaagttgcataccagtagaaatcgttacagtagttgaaacacctagtttttcaactgtttttaattggtttacttgtcctaaagcccagaataaacctgaaataaaaccaacaattaagattgtcattgttaaagctggttgagtaaatacatacataattgttgcgaagaatagagcaccgattgtcatacctaccgtttggctatatgcaccaccgcccatttttacgcttactaataagatgtttccccatgcaattgcaggaagaagcgctaataaaatgtccattacaagactcccttcggtttgctataccaatatagttacatatcgttctaacgatcggtaatgccccactaatagagtagaagattaccgatcgctaaaacaggatgaagaattcacaatataaatgcgttttcatttcttcattttttgaaacacctccatataataacaggaaattgcctattttagaaagtgaattcaaataaaatgtatatttaaataagaggtaaaattcagttatttcccattggtatattttatttcctaagaaataaagaagcagcttcgacaaaagctgctttaagagttagtgattcttttattaataagttgaatacatagtagaaatacgagtgacataccgatagtaataactacaagtgtccaggcgagttgcatattacttgcatcaatagccatgtaaattgcagttgggattgtctgtgttttaccaggaatgttcccggcaaacatgagtgtagcaccaaactcaccgagcgcgcggacaaagctcaaaatcatcccgcttagtaaggcaggaaatgcgagtggaagtgtaacgtgcagaaaaacttgatattcacttgcgccaaggtcacgagcactttcttcaatttgtacatttgcgatagaaaatcccgttttcgctgattggtacataagcggaaatgcaacaactgtagaagcgataatcgcagcagtagatgtgaacataatagactgctgaaataatgattcaacccactttccgatcgggctgttgtttccaaagatgataatgagaaagaagccgataacagttggtggaagtaccattggtaataaaaatatggtttctaatagtactttatatcgccatgaggagcgagctagtgctcgcccgacaattgtccctaaaattgtaacgagaatagtggcgcacgcagctactcttaaagatagaaagacaggcgataaaatagcatcaatgctcatagtaattacgacagaactgtaaatccatatttcttaaagatagattgtgcatcttttgactgcaaatactcataaaatgaagtcgcctctttcttatgtttagattcctttataacacctaaaggatagtggattggctcatgagaagtagctgctgctgtctcaccaatctttactttatccgaaatgagagcatctgttttgtatacgatgccagcatcgacattccctgtttctacatatgttaacacttggcgaacatcttttgtaaatacgactttattttgaacatcattccaaaggttttcgtgtgttagagaagcctttgcatatttgccagcaggtacagattcaggtgtaccaagtgcaatttttttgattttctcatcttttaaatcttgaaattttgtaagtgaactatctttagggatgactagaactagttcatttccaagaagatttttcccttctttttcactaatgaatcctttttttacaagggtttggaatttatcttctgctgcagagaagaataaatcagcaggtgcaccttgttcaatttgttgttgaagtgctccagaagcaccgaagttaaaagaaagtttgatatttggctctttttctttatattgtttttcgatttcttttaatgcatcttgtaagcttgcagcagctgagatagtcagttcaactgttttatcctctttagcagctgactttgtatgcttttccccacttgtacaagcagcactaaatataagaaggaaagaaagtataagtgccccgatggaacgtaatgtaaatttattcataaaaaaatcccctttcgttttgatacatctaattataactaattatatctaaatataactagttataattgaatgtaatttgaacatatatctatttttaaaaaataggagaaatattcttttctttgttacaatgaaaggagaaagtgaggaatcgtctatggatcatcattcctacacaacggaagaagtagcaaagcgattaaaagtatcaaaattaactgtatacgacttaattaaaaaaggagaacttccttcttatagagttggtagacagatgcgcattgatgcaacagatttagatcaatatataaaacaaatgaaaacaggaaaggtacaagttactcctgtaaaaaacgatggtagtagtatcttgaacacgtgtattattagtggtcaagaactaacgttagatatgttagctaaacgtatagaaaatcgtttgccaagttctaatgttttaagggcgtatcaaggtagcttaacgagtttagtgaaaatgtatcaaggagaaggaagtatcgttagtttgcatttgtttgatggtgaaactggtacatataatgttccttacgtaaaacgcattttagtaggacagccatgcattatgattaatttattgtccagaaatgtaggattttatgtccgaaaaggaaatccgaagagaataaaggcatgggctgacatatccgggtccactataaagtttgtgaatcgagaaaagggttctggtattagagtgttagtcgatgaacaattacgaatccaaaaattaaataaagctgatattagtggatatgaatgggaagaatcgaatcatcttggtgttgccacgcaagttgcaaatggaaaagctgatgtaggagtaggttcagaaaagttttcgcaaattgtaaatgtggactttattccaatcatgaaagaacagtatgatttagtaattttgaagaataaagaaaatgaagagttgattgaagttgtgaaagacattctgcaatcggaagaatttcataatgaattaaatgcgattggcggatatgatattacgaaaacaggtcaaattgtatatgaaacaaactaaaaagctgcttgtctataagacgagcagctttttctatatataaagggggttggggaaacaaagtgttaaacaagaccttgagcaagtgtataaatgaaagccgtaagaagagtggctccacttgcaagtacgataaagtctgatttgttgaaagtaatgttgttcattataaactctccttatttgtttaatgtagttgcaacagcttttgcatcgacaagtgcggatagcaccatgcccattgtatttaaaaatttatttgatttcatattgttcatcatgcgtatccgctccttttcgaattgttgttgccctgcttatgtcttaattataggaaatatggctacttgcaactattgaattagcttacgaaagacttacacttttgtaagaaaaaaagacattcatgtaagaatgtctttcacagcatattgatatgatgatggtcttcaattgtttttaaaaaactacgcattgaattcgtcatatagctatctttacggcgtatgaaaaccgttgaaatactgccgtatttttcagggattgcatgacaatgtaccttacctgctttagaaagatgatggacagcagactgtggtacgagtgtaattccgaggccgagtgcaacgctgtttaatattgtctctaatatattgaattccataattctttttggtagcaaaccttcatctttaagccaacgttctagtttggagcggtatccacatccttggttaaaaacgagtagaggagttgttgtaaattcttctatatgaaaggctttattttgtgttataagcattaatttctctgtactaacatcgtattgttcgattagtggatgtttaataggacctgatataaaggcgccatccaattgatgatcaagtacttctctaattaattcttctgttagacccgcttgtaatgataaatcgacatttggatagcttttatagtaagaagataaaatggtaggcagtgtacttactgtttcgactgtaccgattttcaatataccggagggtgtttcgctatctaaaaatacttgttttagttcgtcgacatcttgcaaaattttactaacataaacgagcatttttcttccttcagctgttaaagtcattcctcgtttatggcggtaaaagagtggggtttttaattcgttttctagttgtttaatacgtgtagttacatttgattgtacataatttaattcctttgctgcgctacttacactaccctgatcggcaacgcttttaaagatttgtaagtctcgtaattccattttgtaatcccccttgatgttaactatcattataaatgatagttaacatcattttgaatcattttacgtgatatattttttcttttacaattctctttgtgcaaatagaaagaaacgggggattgcggtgagaagaggtcaaatgataataggggctgtagcgtgtttaattgcgagtatgtcatggggagcgatgtttccagttgctgatcatgcgctagaatacatagatccattttatttttcgcttattcgctatggagcagtggcgataatgctgattgtattgttgttagtgaaagaaggaaaacaggcatttcgtttagagggaagaggaaagttactcgtcttttttggaacgatggcatttacagtatataatgtcctcatatttttagggcaaatgttgatgggtaagtcgggtgtaatggtagcttccattatggaagcacttatgccgatgatttctatttgtattttatggggatataagcatataaaaccgaagaagtatatgataacgagtatggttattgcttttgtaggagctgtgtttgttattacaaaaggtgacatgagtttctttgtaacattgaaagataatatgttcccattagcatttatatttattggtgttataggctgggttatttatacgatgggtggtcaaacgtgtagtgattggtcaacattacgttattctacgttgacgtgtgtattcggtacgactgttacaggaattataacggtaattattacgtggcttggatatgtttcagttcctagtatgggaacgatttctattgtaaaatatgatttgttatttatgatgacattgccaggtattgtagcgctacttgcttggaactacggtgtgaaaattttatcatccattaatgggattttatttattaattttgtaccaattacgactttagctattatgatgatgcaagggtatcaaatcacaatgtttgatattatagggactgtacttgttattgcagcacttattcgcaataacgtttgccagagaaaagaagaaaatataaataatagagttttacaagaagaacaattacgtcaagctgtttaataggcaaatggaggatttcacatgttagaaagtttattgtttttcttcgccgtcggagttgcctgtgagcttgcagcaattaatcgaaatggtcgtaaaaagataaaacaacaagctgagctgatacagcttttaaaagagttgaaagaaagaaaaaattaaaaagacgaccgggcatagacggtcgtctttttctatataaaggggaaaggggacacaaagttatacaagcgtagcagcgtaaataaaagcagtaagaagaagagagccgctagctaatcctaaaaagtctaatttgttaaaagtgatgttattcataatacattctccttacttgtttaatgtagaagcaacagcttttgcatcgaaaagagccgataataccatgcccattgtatgtaagaaattgttcgttttcattttgttcatcatattaatcgactccttttcgaataattgttgccctgtttctgacttaattgtatgaaatatagtaagaagtaactatcgaattagcttacaagaaaattacacttttgtaagaattgaaatttaacaattcatacttatttttattaccaactcctaaaacttagtgttataattgttgtaagaatatgattatacttcggatgtttagaaaggaacgaaataaatgtataaaccaattacatttttgttgaaatatatatttaaaacagctgggaaagtagaagtgcaaggaagagaaaagctaccagaaggtggtccgtatgttgttgcgtgtacacatacaagttttatggatgtattaatgttagctacagggatgtacccaactcaaattcattacatggcaaaaaaagaattatttgaagggaaattcaaaaattggttctttaaaaatgtaaatgcattccctgtagatcgcgcgaatccgggaccgagtacacttaaaattccatcacgtttattaaaagaaggaaaggtagtagggatttttccgagtggaacgagatcagcggaagatgtttcattaaaagcgggtgctgtgacaattgcgatgcgttctaatgtacctttagtgccggcagcttatgttggtccatcaagtgtaaaagaattaataaaggggaaaaaggcaaaattgatttttggagatccgattcaaattgaggctggagaacaaatagatcgaaaaaccgctatgaaaatgatgacagatcaattaaatgagaagtttgaggagttaaaagaagctttgcaatcaaatcaaaaataagaaaagacgaccgggcatagacggtcgtcttttctattactatttataataaaggggacacaaagttatacaagcgtagcggcgtaaataaaagcagtaagaagaagcgagccactagctagtcctaaaaaatctaatttgttaaaagtgatgttattcataatatattctccttacttgtttaatgtagaagcaacagcttttgcgtcgataagagcggaaaataccatgcccattgtatgtaagaaattgttcgttttcattttgttcatcatattaatccgctccttttcgaatagttgttaccttgtttctgacttaattgtatgaaatgttgcggaaagtcactatcgaattagcttacagaaaaattacacttttgtaagagaaacaaatgaaggtgtaatgataagaagatttgacatatgttcatgagattcattaacttaaagatagaggtgagtgcatggctaatattaaagatatcgcaaagatggcgggagtttcagttacgactgtttcgagagtgttgaatgatcacccatatgtaagtgaagaaaaaaggaaagcggttatagagatagttgagaaattgaattactcgcaaaacgcaaatgctgttcatttatcaaaaggaaagacgaatattgttggtgtgattttaccgtatattaatcatccgtgttttgatgcgatggtgagcggaatgatggagattgcgttaactcataattacagagtgttactttgccaaacgaattataataaaaaagaagaaatgaaaagtttacatatgttaaaaacaaaacaattggatggtcttattatttgttcacgtgcaaatgattgggaaacgatagaaccgtatgcttcttacggcacaataattgcttgtgaagataatgatatttcaaacatctcaagtgtatatacgaatcattcagcggcctttcaattaggaatggattatttgattgagaaaggttataaaaaaattggctattgtacgggaagaaaattagggccgagtagtcaaaagcgttttgatgtttataaacagcaattgcaatctatagatgaagaggttaacgaagaatggatttttacagaatgttttacactagaagatggtgtaaaagtggctcataagttaaaagagatgcaggatcttcctggagcattaatagtagcaggtgatgaagttgcgattggggttatgacagaggttgaaaaattagggattcaagttcctgaggatttagcgattattggctttgataatcaacctatctcgcaagtgttacaattgacaactattgatcaaaatttaaaggagatagggaaaactgcttttgaaatgttgcatagaaaagtgaatgacgagagttctaaacaagaaaagctggaaattccatacgaacttgtggaacgctctacagtttaatcttaatccgttatgtgtataatcgcataacggattatttttttgaaatatctttgacaggaaacgcgtttcatactttataaaggagttaaaccggtctgtaatatccatggattcttttcaagtgttaaagcagtgaatagaatttggaggaatatgcatgaatgaacttttatcgagtatgaaaaagtatgtagatgatgatgaaaagattttagtttttgtggtagggatctttgagaaggataatttcatgttatgttatcaacatggaatttttgttgccactactagacgcctcctgttttacgggaaatttccttactatccttcaacatttaaagagtactcatatgtgcatatagatagcatagattttcatccgtactttgagtttacttgtaatcatgaaaccattcgcgctaagtatattcagaaagggaatgtggagcaatttgtccgtgcagttagagcaaatatgaataattaatcaaccctctgtttaaacataatatttcaatttttaagagggaaaatgcggaataaaaaccacttctaaacctctaggagatagtgatacaatgtcaaatggggggagggtatgaactatggttaatcaacgtataaaggaaataacactaattacaattggttcattattattcgcaattggtattaattactttgcaattccaaaccgtttatcggaaggtggaattattggtttaacggttgttacgtactacttatttgattggtcaccagggattgtgaattttgctataaatgcaattttactagctattggttataaattttttgataagaaaacaatgatttatacaattttagggattgtagaaacatctttgtttttatacgttacagaacatattgagtatcatgtaaatagtgatacattattagcagctttatttgctggtttatttgtgggtattggattaggctgtatgttcaaagccggaggtacatcgggagggtcagcaatcttagctcggttagcaaatcaatatttaggttggagcgtaggtaaaggcgtactaattattgatattgttgtaattgctggttctgtatttataatagggcaagaaaaggcaatgtatacacttgtagctgtgttcatcggagcgaaggtgattgatttcattgtagaaggaatggatacaaaaacggctgttacgattatttcgaatcaaccagatttaattcgtgaagctattacgaaaaatatgacacgcggtgttactgtattagaagggcgcggcggatatactggtaaaaataaagaagttttatatgttgttattaataaacaagagcttgttaagttaaaacaagttattagccgggtagatgaagatgctttcgttgttatacatgatgtacgtgatgtacttggcggtggctttaaagcaagctaaaaggtgaacgagtaaattcgttcaccttttttaattcttacaaaaatgtaagtgtaatgtaatgagattcaatagtagattttattccccctttttaaaatggatgtatatatatcctgcagaggaggaatgtttattatgaagaaaaaaatgatcactactataatagcgatgatagtgatagtagtaatgttactgcctacgaaacttggaccggttatcgataaatataatccattttataagacgaaagaatactatacggttgtgaatacaattggtcagcatattggtgatgagtggtatgaatatgaatttattgcattcgatgaacgtggtagagagcagaaaataaagaaaacggttaagcatatgttaaagagagatgaagcattaaaggtttttgcaaaaggacgttacggtgaatcgattgaagagattgaggttgcaaatattcctataaatgcgaagagtaaacttttaacgatgagatagtaaaatatacccccagctattttttgtcgaaaataaaaataccaggtaagggtattttaggagttaataaaaaagccttagtccatatagactaaggcttttttattatataaaggggaagggggtacattgtagtagcatggttgaaaggtataagaagagtagctactagcaatgcaatttggttatttgagtgttcttcttatttggcttactttctaactttattgtacgaaatataagtaagggaaactatcgaattacattacacatagcttacaaacatgtaagtcttctgtaatgtaattcgatggttaaaagatagtgaattttatatagtgtaattagaaagtctcactgtattactttccgtttgtaatataaatgaagaatgaaaaccaactactttttaatagccctcatctgtatgtagatgaggctctttttataaaccttacaatattgtaaggtttacgtaagttaattcgatagtaaatttgtcatattttttgcataatagatacagatagaaaaataattagggatctagtaagaagggagaaaaatgggatgcgtaaagaagaagtagtgaagttaccaattaaagatttctgtagctactttactgttgccgtagtgtgtattggattatttgatatcataacaaacttaattgttaaataatatagatgctaaaacaagaaaggaagtcctttcttgttttttttatgggggcataaagatgaaatggattgatagtcatatacatgttgatcaatataaggatgaagagaagaacagattactgaaagaggtggaaaatagtaatgaaataaaggggcttattgctgtatctatgaattatcaatcttgtaaggaaacgttatctttagcgaagaagtatccctttatatatccagcgatagggtttcatccagagcaacagattcataaagaagagtgtgaacagatttataaacttattgaacagaacgcagaggaaattgttgcgattggtgaagtaggtttgccctattatttgaggaaagaagatgaaagcattgctgtagatccatacatagctgtattgaaaaaatttatagaactagctagtaagtataatttgccgattgtattacacgcagtttatgaagatgctgacactgtatgtgatttgctagagaaatataaagtttcacgtgcacatttccattggtttaaaggaagtgatgaaacaatgaaacggatgatgaagaatggttattatatttcgattacaccggatgttttacataaggagaagattagaaaaattgtttcgtattatccgcttgaatatatgatggtagaaacagatggaccgtgggaatttcaagacgatgttatgacgcacccgagaatgattcgagatgtattaaaggaaattagtgttataaaaaacatatctgttgatcaggttgcagaaacaatatatgaaaatacaagtcgattttatttgaaaggataggagaattatagttttaatcatgtaacggaaaaagtgaaaattgaatgtatttaataaaatgccacggtttgatatatgacaaaaaaccaccaagcgttccgctcggtggttttgtattaggattctaatttcttcgcacgttttaataataaaagaaagacaatgataacgaaccccagtataaggaagaagccatattgctttatataatcaattatgtcattcgcactggttggtttttcaacgtgaatgccgtctttattcgtcgtaatatgaatatctttcatttttacttcattcttttccttttgtaaatcaatccactctatatttggaatactttctagatcctttaatacttcttttaatggtttcacacctaagtaaggatgataaaatgccccaataatcccatcggataatttagaaacagatagagcacgttctttcattttagcaatagtttgtggcgtatcttcttcaataaatccgactgtttcaggcaatagtttcattccatgtaaaaatgacggagtacttgtataatatggtgagtgcatggatttccaagttgtatcatttaactgtagttgtcctacataagttgaaaagtaccttgataatatttcatatcctttttgagacatcgtgtaatgaggtgcttcaaaggcaacaggatatagtttagcatctacaagttcttgaattcctttttcaatatgatctttcgtatatttcccctcgaattcttcccctttttttacatattggttatatgcctctatatttggaaagtcatcttttgtcttcggtttttcatgcttcggttggcgaattggttgatctgttttgacatcccaaaattcaaagccctcacctgtttcactgtcataaaattggtgagtataaccatgcataataattgctgcaccatcatcttgcatagagcgtaaaagatcaactagttctggtttatcttttaaatgtattatctttcctgtatctggatctttatataccggaataacagtaatcatgtaaggcatctttttctcttttagtaattcagcaatttctttcaattgatttatatctgctgctgggtgaacatcctcaagacgtaaataagcttcaactttatttttcgttggtttttggctgaaataagaaaataacatttcaccgacgtaatgagacatccagtcaaagaggttaggtgttgcaacataataagatatttcatgctgaacgattagtgggttagtgttatttgagcttaaagcgttagcaagcacagttccattcgtatcaaatgattgaattaatcgttcctcttctaaggtattttttagcttcttttctggatattcaattttattaactcgtatatcgtcactcttcaatgtaatgaaagaaaaacgcttagataattgttcaacattttgtcctaatactaatacaggaccggagaagttttctagaaattgtttcgtttcatcagaaaacgcttcttttgtttcaccgatataaacaatatgtgtataggaggatacgttattaattgaagttgcttcttttaagttttttagggttatatcatttgtaaaatgtcctaattgagtattaaggatttggacattatttgaaactttatcgtcttgtgtactatacaaaacaagtacttttggttttgatgatgtttgtgcagaggtgtaggtagggatgagtagtaaaatgctgaacaagagtgttaggcattttttcattttgtacgctcctattctatatatagagttcagtttacaattatatacaaaaaatgcgttatagtctatgaaagttacattttttcacatatttaccagctgttttttcacaaaatcggtctaaagcatgatgataatacgtatagttatttgctatgataaaagagtaatagaatgtaggtaattgtaaagggaaggctgaaaggggacaaatttcagcggagaaagaggtagaggtagtgaagaaattctttgtaggatttttagttgttcttggagtatatttatatttccaaggaaagtctgaaggaatggataagctagtgaatggaacaagctatgttgattcagaagaagcaaaacagatgaaacaaatcattatagaggaagcgaagaaagtaaatcttccagaatggatacctcttgcaattgccgagcatgaaagtcgattaaatccaagaagtgttggagataatggaacttcattcggattgtttcaactacaccgcggcggcgggcttgcaccagaacatttaactgatgatgagctgaaagatccacgtacaaatgcgcaaattgcaatgccgcatttaatgaaaggatataagcgtggggtgcaaaaaggtttgactgattttgcattactgaaatatatagcgaatacatctggatggccagggaatttagggccagagtggacggataataacatgaagtataacatcggactagaagatgtgtactatcgaaataaaggtgtaataaagtgaaactttaatcagtgggggagtctgttcatcccccgctgattattagtcttcaccaatcgggcttttacgagcagttaatcttccgcctaaattctagcgttttccggattttgaggtggaagttttactgctcgttaatgcggggtcaaagagtaggttttctatacctactctgtttttttatgaataatttcatccttttctttcgtgaaatactgcgtgagttgtattttcacctcttctagttttgtagaaacttgcggtattttatatcctacatacaatggtgaaacgacaaatctaggtacaactttacaaatgatttttccatttaagtaataaaagaataagttataactactgcatcctttatggaaatctatcagtatgtaacgtacagtttgctgaatgtaatttgccatttcatctatatatgaaatattatcaatgattatattgaattcagtgaagccaataatgggacgctctgaaatattaagctcaatgcgttcatttttttgaacaattaccccttgaaaattttcttcttcaatattttcaagataatctacatatttcattccgataatttgcatgtgtgcatgatgcaaacttccacctgaaaatggaccgtgatttttgtataaaattacagatgcaaattctgcgttcttctgtaagtgtaaccaatgttgaatagaaaattgcattaattttcgcatatgttcttctgtatatgttgcgatatgatcttcgcaattatccgtttcaatcagcaccgtttgaaatgtatcttgtaatgtaggaaatttattttttaaccaaataatagaaccatcagttgctaaaatatccgttaaatgttctttatcgcaaaatggacatgcagcgcttctattccgaatactttctggtttttgtttaccgatatcgtttaaaaaatatagttgttgtgtatccatttgtatatatgcccctttaaaatatgtgtaaaaatcccgcttaatacattcgggaaaaggagaaggaaatcctctaaagacaatatggaaaaaataaaagacaagatatcctcattacgatagggtaccttgtcttttattttttctctaatagtgtgtatggataatatagaacattttcattatttttcttttttctattttttattgtgtataaagtaattgctgtgcttgcaattataataatggctttcttcatattcatatacccctttttattgttggtttaattcttggctaactgcttttgcatcgactaaagcgtgtaaaatcattttcaccatgttcatcatatttcttcactcctttttatagttcatttagttcttttacaactgcttgtccgttcactaatacctcaaagattgcttttacgatttctttcatcatgtttgtttcctccttgtgtttgtctctcttgttttacatctttattgtatagggaggcatcttttcgtactatcgctttccattacgtgaacataacagttttgtaagatttgatgtcacttattgaaatgtttagtctatcttcattattttcagaaaaatgactattcaaacatgaaattggaaagtataataaagaagtaagtattaaattccgtacgaaaggggtgaatgagatgaaacgttctttagctgcgcgtgccaaatttttagattttatctatttttgtcgtgcgatttttcatgatgtagttgttaacgggatacgtatgcccttttttaacaattgcatagtgactattgaacgatagaaatctcttcacccatttttaataaacgtgtgaaaagggagctatttggcttcctttttctatgccgaaaaccatggggaatgtttctttctcatggttttttatattgaaaggagtacggaaaatgactatttgtagtgtaaataatgtaacgaaatctgttggtggaaacatcatatttgaaaatatatcgcttgaaataaagaatggtgaacgtgttgggttagttggtcgtaacggtagtgggaagacaacaatctttgggcttctaacgggaatggagagtttggatgcaggagccatccatatgaagaaaggtacacgtattggtcatgtcgcacaaattccgaagtttgatgaggtcatgactgtatatgatgtattgagttccgcttttaaagtagaaaaggaattagaaaaagaaatgcatgctctagaaaaaaatatggcggaggagcaggaacaatcttctttgcaaaagctaatggagaggtacggaataattcaagaaaaatttgcatttctcggtggttatgaaatagaggcaaatataatgaaggtagcaaatggcttacaagtaacagacttatttccaagagtatttacggaattaagtggaggagaacagacgaaagtaagccttgcatatatgctattgcagaaaccagatttacttctattagatgaaccaacaaatcatttagatttgtttgcagttgaatggttagagaaatttttaaaagaatataatggaacagttatggttatttcacacgatcgctatttccttgatgaagttgtaacgaaaatttttgatttggaagatggagagattcacgtgtaccatacgaattattcccagttcgttgaggagaaggaagaaagattacttcaagagtttcaagcttatcaagagcagcaaaagaaaataaagaaaatgaaagaagcaattaagcgcctacgtgaatgggcaaatcaagcgaatcctccgaatgaaggattgcataaaagagcgaggaatatggaacgtgcgttagagcgtatagagaaattaaagagaccgattttagaaagaaaacagatgggtcttcagtttgaagggcaagagagaagcggaaaagatgttgttgtaatgaaagaagtgagtaaaggttttgctggccgatctttatttgaacaagcgaatttacatgttcgttttcaagagcgtgctgctatcgttggtcgtaatggtacaggaaagactacattattaaaactactattagaagaaataaatccagacgttggtgaaattcgaattggtagtagtgtcaaaattggttatttatcacaacatgcatatgaaaatatgaagagtaatgtattggaagcgtttagagagtatgtggctgtaacagaaggagaagcaagacatatattagctaagtttttattttatggtccagcggtgtttaagaaagtaacacaactgagcggtggagaaaaaatgaggttaagacttgcgcaacttatgtatcaagacatcaattttctaattttagatgagccgacaaaccaccttgatattgaatcaagggaagttttagaggaagcccttgagcaatataatgggacgattttagctgtttcacacgatcgatattttttaaataagttatttgaaaagacgtactggattgatagatgcaaattatttgagtttgcaggaaattatgcatgggctcgtcaaaagtgggaggaaaagattgagaagcaagtaataaagcagaaacgccaagggagaaaaagtgttgaaacggttcctgtaaaagagaaagaagctaggaatcttgaagagattgaaaatgagttaatgcatgtagaagaagatatatatgcaatagaatgtggaatggaacatgtagctgatgttgaaaaacttgaaaaattatatgaggaaaaaacgaagaaagagttgttacgagcagatttatataatgaattagagaatattgtggagtaatgagtagaaagccacttcctttcagttttgctggaggaagtggctttcttcataatgatattttgctttaaaggttaaatgaagcgatgtgtttcacgtgaaacagtaacttaaataaatccgtgttcctcaatttgcatagcttgtgaaacatatgaaaataataaggtaaaaaataaatgtcattagtggtttttggataggcgtaattacaaaaacaaaggctaattatttcccgagagataaagtgagggattttacgggcaccccgacccagacctaacttcttttgctttcgctgaattttgaggtgggggtcttactgcacggcaaatagcgggataaatatgtgtaacagagactagtgaatggaaacgaaaagagagcaaagttacagctttacgcgctgaactctgctctctttttgcgtggcatcttctctcgttgaaattataatagcgatcccgagcataataaaaaaagctaaaaagaggacgaactttgggaagaacgggaatagtaatagcgctccgactatcataattgttaataatacgtagtgcaggacgtattggaataggttgtccatattttcgccccctttttggtaattggttattagtattctatgtttcatgctgaaggaatagaagtagatttttaagttttaatacgaattatagctgagttttcttaaagtataaatgtagagtgaaaattttggaaaaattctcaaaatatttatttagaaagaattgacaaaacataatgaacgatataagctaataaccataaagtctaccggaaaagtcggaataagattgttacccctcaaaaacatctatttttttctgattaaaaccgacttttccgattggctataaatgtgctgtgggaggcatacataagctaataagttcaagggtataactattaaacagttagggtggggacaatgaagaaaaagacaaaaaaatgggctggtgtattttcagtattactgagtagttcgcttgtgttatctgcttgtgggggacaggaggatacggcttctacagagccggttaagcagcaggatttaaaaaatgtgaaaattgaaaagattgccgcgacagataaaacgaaagtgccagacaaagcgaagaatagaaaagatacgttagtagttggtattagtaagccaggcggcgtatttttaccatactttcaacaaaatggttgggatggaaacgtaacttcagttatttttgcatctctcgtatcaaccgataaacaagggaaaccaattccagaattagctgagaagtgggacgtttcttctgatcagttaacatatacattccatttacgtaaaaatttgaaatttagtgatggatcgccattaacggcggatgatgtagctttcacattgacgcttttacatgataaggcatatgaaggtgaagtagatatctctcaatatgccgttaaaggtggtaaagaatataaagaaggaaaagcaacttcaattgaaggtattcaagttgttgatccacaaacaattaaaattacaactgaaaaagtgaattcacaagctatatttgttttaggaggtacagtactatcaaaagcttattatggaaaagattataagcaaaatacaagcttagattacttaaaagatttatatggaaagccattagctgcgggtccatataaatttgaaaagtatattccaggtcaagaagttcgttttgttgctaacgaaaattattatgcgggtaaaccaaaaattcaaaactttatttataaaattacttctggtgatacgaagcttcagttattccaaacaggagaagttgaccatactggcttaggtaccggtgatgaggttcttgaacaggctaaggctttagaattcgcaaatatccaaatcgaaacagcgccgtcatttagttatatttatatgaataataataagccttacttaaaggataaaaaggttcgccaagcacttatttacggattagaccgcaaaaaatatgttgatacagcgttaaaaggatacggtacagtagccaatgtaccaattcatccaacttcttgggcttatacggaagaaggagttaataaatacgaatacgataaagaaaaagcgaaaaaattattagatgaagcagggtggaaagttggttcggatggaattcgtgaaaaagatggtcaaaaattaaaactttcttatttcggtccaagttcggctaaagatagtgatttattaattccgattgcgaaagagaattataaagaaataggtgtagagtttaatcctgaatttatggactttaatacgatgctttctaaggtaaacaaaggagattatgatttagcttctgtttcgacaccgattacaagtgacccgagtgaaacagctggtgaatatttgtctactgcaaatgaaactagtcttggttataagaatgcaaaagtagatgagctaattcaaaaaggtattgaaactgtagatatcgaaaagcgtaaacctatttataaagaattgtataaagaattaagtgatgatccaccagtaattctattaaactaccgtagaacaattactggttataacgggaatataaaaggaattgatcctgaaaagtacaacagtattagtgcaaacttaccagtattatcatttgaaaaataacgataagaatgtataagtagaagacattttttcattcggttagtaatgtgccgctttgaaaaaatgttcttctattttaagcataagattggagagaaaaagggtgaaaacatatattgttcgtaggttgttacaaatgattcctacactgcttggtacatcaattattatcttcgtcctgttcgcacttcttcctggggattatattgattcaaacccgaaaattacaccggaaagagcagctgaactgagggaattatatgggttgaacaaaccaattgttgagcgttattttcattggttaggtaatgcattgcaaggggactttggcttctcgcttcaatatcaagagcctgtaacgtcattattaaataaatttatttggaattcttttagtgtagcaattattgcattgttttttatttggctaattgcacttattatcggtgtattctcggcgacgaagcaacattctttattcgataaacttgtaacaatcggtgtttttgcagcaatgtcatttccttcattctttatcggcttgtttttaattaaggtgtttgcggttgactttaagttattaccgataggtggaatgattgatgttggcagtaattcaacaggatttgcttacgtgatagaagttgcaaaacatatgattttaccagtatttattttaacacttcttggggtcggctcgcatgcccatcaacttaagaatttgcactacccccaagtgtcaaaaaacgttattcttcacgatccgttgtcgcatactctaaaatacaccccatcggacaagcaaatgcattcatttcttctacatatttaaattggctttttgaccctttacgctccttgaggaaggagtcttcttggctaaaatgataaatttgaagctataaaagtaacagaattatgtaataagtgaatcaaaaaaacaaccccaaaagcagacatggtaacctgatatttttcattcttttttttatatacccaataagcatagttatataaaagaccaattatcgttgtaccaactatataagtgattccatatggatgatttaatccaaatataattgaagctattaatatgataaggtaatcgtgatttttaatgtaaggaatccaacttaatagccaaaataaaaatacttgaaaaactattgtttcatatataggtgccgctaatacccctaataaaacttgaagaataagaggtgcttctgttattgggtttttttgtatttcaggtaagaatagatctaatggtattacaaataaaaatgatcctaataaaataagaaaaataaaagaaatggtaggcaaagcaaacataaatctatttatttttttgagcatatatatttctcctataatcttttattacatctatacgaaaagtaataaataattgagtctctttttgtttgacatgtttttgtctactattgatgaaaaccgttctgtaattgaattcttggcttatatgtaggtgtagcgataaagtagggatatattaacactatattgttaatattaaaatattaaagagctaagtgagatattaagttcacaccaattttatgatgaatataatatcaagccagttaaggaaatatgctgtataggacacgcttgtactgtttattttactatatgaatatttaagtgcatatagttttggaggagtatgtatttttgcattttttaatacaaaagttttttgttaaaaatttactttctgcgctacctcatatgaatttaagacacttgaagagtaaaggccaaaagagtctaagtttagattgtacaggtaaatattataatattatagaaaaataaggggaaaagttataaaataggagattgaattaaactttcagattttattgttctgcaagataaaaataactaaagatgaggctcttaaaaattcttatctttatttaaaactaacgatattataaaaaatccttgctgaaggtactgcaacaaatctaatttgaaaatctttaggagataaatatggaattttaaatattcttagtcgtctataaaacattatagcaattattataggcaaatcctttaatatcatcgatttagaagaaatcagtacaaatagaaaagatgaagtggtagaagtattacgtcttccttttaatagatttccaagagcagctggacatataaaagatgcaattgtaaatgaaaaaaattggaacatttagttgaacgattagtatgccattttaaagtttaaattaataacagaaagagcacctcttaatatgttactactttgtttttgtattgttgaaaataagaaaggagaaatcaatgaaaaaatattggcataagctatcgttacttcaaaaaaatgtattactaacggtattagtaattctgacccttgttggaagtatgggagcgttaagttttaatatgtttcaaaatagtatgatgtctatatttgagaggcagtcttttgaaacaggtgatgcggtattaaatcaattagatctagaaatagtaagagatgtagcaaaagaccccacagctcaaagagtgaagaaagaaaaattgacagagcaattaaataaatctataaaagatatgaaaagtgttggacaaacatatgttacaggagccaagctaaatgaaaaagctgaattacaaatagtagctttggatacagaattagcaaatactgtttctgtaaaaccaggtgaatactatgagcagcctacttattggatgaaaacatatgataaagtaatacaaacaaaacaggcacaaatgacagaagtgtatgaagatgaattagggttctgggtaacaattttagagccagttacagatgaaaataaaaatataattgcaattgttgcagcggatttggaagcttctattattccacttacaaagaaaaactttatgatacaaggtttactatttattataatttcattaactatcgcaattacaattcaaatatttatctcacgaaactctctatcgcctttaaaggatttacaagaagggttacgtaaagttggtgaaggggatttaagtattaaattgaatgaaagatctgatgatatagggataactaatatctattttaataacactattaaaaagtttaataagattatagataaagtaagggagactgctgaacaagtttcgacatcttcacaggaattgtcggtaagtacaaaagagaatagcatagcctttaaagaaattgcaagtgctattacaggattaaatttaggagcacattctcatgaatatgtagtgcaaaaatgtttagggattgttcaagaaatggaaagtaagatgaaagaaattaaaggagctgcaaaacaagttggcaatgctttggaagacatggaacagcattctgtagagggaaaagatttgattaagcaaatcgtgaatcaaatgaaaagaatccaagatacagttcaggatgtatcttctagtatttatgcattcgaagcacgatctaaggaaattcatgaaattcttactgtaattacaaccatttcaaatcaaacaaattcattagctttaaatgcttctactgaatcctcatgtgctggagagatgggggaagaattttcaggtgttgcggacgaggtacatatattagcggaaagaaccgaggcatctgcaagggatatagctaaattaattggtgaaacccaggctgaagcagagagagctgtaagatccatacagaagagttcaaaggaagtagaagtaggaataacacttgttcaaagtagtggtgctttttttgaaaagatttcagaatctgcacaatctgttacaaatcaaattaaagcgacttcgaatcattcaagtgaaattctaacagataatcaaactattgttcagtttataaatgaattatcacacattgcgaatacatatgtgaatagtagtagtaatgtggagacaagtatgaaagagcaagaactatatgtacaagatattgcagagttagcaaattctctaaattggctctcgcaagagttacaggggttaataggggaatttaaaagtaagtaggatagaagaaggtaaaggtatagggtatgacctatacctttatttattcccacataagggatgaaagcttaggtatatatgtaaaatagctaaacgaataatttttttgcatattttgttggaaatagagcatgatattaccaaattcaacggaggtgtttaaaaaatgcaaattcgcgaaaataataattcaaacgaaatcttaatagcagctgcagcaagtgcaattgagcaaatgaaatatgaaattgctcaggagtttggtgttacacttggaccagattcaacagcacgagcgaatggttcagtaggtggagagattacgaaacgtttagttcgtatggcgcaagagcagttatctggtcaatataaaattcactaaaactaaaggtatatcccattgaagggatatacctttttaatttgtttttaaagaggatcgttacattttttattattggttaagtttagaaacagcaaatttagctgtaaaattcatcttcttcatgtacgtagaatttacacctgcttgaaattgtacagaaatattaccgtctttttgcgctttaaatacgcgaccatatggggaattagcattgaatgtgccaattacttgattatccgcatcaaagaccgtataagaaattgggaaccctgaattttgtacaaagactgtaagttcttccccttttttaagattaaatgattctttttgagacacttcataggaactcatagagtagtattttgtgacttcttgaatttctaaattcgtagtagctgcactcgcttttgatgcctcagcccctggtaagtttatacctgaaaatactgcaattcctagtgcccctgctaaaatcaattttttcataatagtatttcctcctttaatatattgtgagatttgaaacgaaagtgaaaatttcaatccctgaaaccattatagttacaatgagaattattttcaataagggttagtatgtaattttgcatatataaagtattaacataaggtaatcagtcaagttttgaagtattcttaacagaagggaaggaaaaaattaaaaaatcatgaatgatattgtaaccgaactatatatcttttgagaatattccgtctgcatcaagtgaatatattattaattttatttgtatttgttttttatcataaaacattttaaggttgataaagtttcattgagtgggattattaaacaaaaattacaaattatatgttatgataaaaaggcaataaagtacatcatcctgactttattgtatgtgtttagcctatgtatgtcgtttgtattaaaaataagaagtctcttaaaaagagacttcttattttttgtatggagggggtattacagatgattgattactatcaaatgtttttaattactatggcaggtattgccttattttttttatatacaacatgctggaaaaccaacgaaaagaaacaaatggaagtttttaattgtagtattttattttaccttttgaattatttatttcttaaatttttatagatagatgtagaggagatacgtttatcattctaaaaaataatgaaaggaaggtgtaatccttcctttcattatccagtatgtccgtgcgaatatttaataatatttacagtactttgagtgcctgttgaaggacttgatccaaaagttactgtaacgacaattaaaataccaagtaagctaaccgctaattttttcattttaatgctccttttttaaagtttttttcattggctttactagcttcataaaagtaatagctagcttttagatgattatcttctttgtaaaattggactgctaacttttcggtatattcatttatatactcatatagttcttctcgttcaaaataagaaattccttctaaaacagctttttctaaatcattagcacaactatgaagatttattttttctaaaatattaaagtgatgaatatagccttcggttcccaattgagtagagagttggaggcccttttttattaattcttgagcaatttcatgttctcctaatttataatgttctctagcttcaatgaatacggctttataatcgctaggtagtttttgattaacttcagataaatatcttaatgctacttcagatagattctgtgtagcgtacataaatcctagattgtgacggacaattaaaatattgtattctaaattttctttttggaatgtatccatagcagagataaagtgttcctcagctaactcccattcctttaaatgagtgcatgctaatccatataagttattacaaaaggcaacttttaattcatatccagaatgctttgaaaaaatatcttttgccttcattacatgattaatacataaaattgatctatgtgtatgacagtagaaaatggctaactcataatggaattcagcatgttcaatctcatcaggtatggtttctaacaagtattcggctttatcgtaatggatttttgcaaggctatgattgccagtaacattggaatgaatggctttaaagaagtgataatagtatgaaaggaaatcgtctgtaggagttttgtaagcatcactttgtttaaagctatctttagaaatacttaagctatcaattaaatattgatgcctaaaatctagtagtgagtagtataataatatcgtttgattttcttctatattatggattttgttttcaatttcttgtttaagtaattgagcggcgtctacatgcctagccctaatttcttgataccattcatttaataaatgagttatttgctcgttcccctgtatatgaacattcattgttcaatttcatcctctccaaagatattatgcagcaattagtatcatatcagaaatttcctctatcaaaatctatttaatagcatttatcaatataagacggaatattctatcaatttatatttgttgagattcaagtagtatgtattattgtaatttgtataacaataacctcttttttcaatttaaagatttgatcaaaatatatttttttaacaggaggaaagggagctatacctaagtaattatgtatagggataataggagaatagaaataaataataacggggaatttgaaatgttagagttaaaagaaaagcaagagagaaaagagattttggaagaagataagatgtttaatatcttgtattatgtgaatacagatgagttaaatattatttctgattttaaagaattaaaagagggttgtattcgtatagcaacaaacttatatggtaaaaattcatctgctttacaagctgtcctacaagcttgtaaagcagcttatatttaatctcttaatagggtgtagcttattattcgctattaataaatggataataatattttgacattagaaaagggaacgcttatagagtgtttccttttctaatgtaattgactttattttttagatctcacataaccagctgcttgagcatcagcttctgaacagaaccaaacaatattgtcttttgtagaatcataatattgtccaccaggaacatggtattttttcgaattggcatttcctttaatttgtcctttacaagtggtattggcttctttgtcatcactaggatcattttggaaaggtttccgattagaaccgttatgattaccactagatgaggaaacaacagcattacttttttgtgaagcttcttcctgggccttacggttagcttcttcctgagctttacggttagcttcttcctgagctttacggttagcttcttcctgagctttacgttgagcttcttcttgagctttatggttagcttcttcctgagctttacgttgagtctcttcttgagctttacggttagcttcttcctgagccttacggtcagcttcttcttgagctttacgttcagtttcttcctgagctttacgttgagcttcttccttactctttgtgtctgctgtatcttttttagtatcttgtgaagtggcaactttggtgtctgccttttgtacagtttgattggaagttgattttccatcaataaatacaatacccattaaaaagaaagctagtgctagatataaatatgaatatactactttctttctggttttaatttgtattttgggtaacacaaattgtggtttaattaatccaataattaaagcaagtaagcttaacggaaatcccaaaaaaccaatattaacaagggcagggcggatagaatttggaataattgcttgaagtattaaaaataaaataaagatataaacaatggaagcaataaacattttccatgcggttttagagcgataaccaaaaatttttctccagttcatttaagaacctccttatctaagatactagattttgctcataaattataatactgtaatgatttaatattgagatgcaattcatcacctctcatttaataaaattaatgtatttatgtaacaaatatacatatctaagcatatcattgtcgttaacaaattttccatttttttattttcattttgtcttgtttactcgaaaaattttagtatattagagattttagatgctttattttggctccttcattagcaaatgaaaggttaatcatcatttaaaaggaaaacttggtgttaaaatatgaattaatataagatagtaagtattaattaatctgtataaggaagtgtgtaggtatgaagagaaaagtatcagtggttggtgcggtaattgttaatgaaaataatgaagtcttatgtgcattacgttccccgacaatgacgttacctgattattgggagtttccaggtggtaagataaacaaaggagaagaaccatcagctgcattaattcgtgaaattaaagaagagcttggatgtacaattgttgtagatgagaaggtagaggaagttgagtgcgagtatgaaaccattgttgttcatcttactacatataaagctagaatcttggcaggtaagcctaaagctcttgaacatgcagagctaaaatggatgagtattaaggatttaaagcatttaaagtgggcacccgctgatgttcctacggtagaagcactgtaggaatattttaatcaaatacccttgagaattataattttattatgtaatatataattatattgttagtttatttgatttcgtttattcccacacctaccttccttatgtgttgtggttgagttgtagaagcaagttttttcttgtttcaattttgagagggcttctttgagccgattagtgtatatagcttattttgctatgcacgattaatcgacttaaaggagcctttttttgtttttttaagtggaggtttaaagtaggttttaagctaaagagaaatatgattgtttagaaggaatatatagtgatgaactgaagcctatagcacctaactaaaagagttatatgaaattatagtaagttaaatctcctatagagatttcaaaataccgaagtaataagcgcagttaaaggggaaggtcccaaattcttaaatggacacaataatgcatctatagaagaggagaattaaaattgaaaccaactagagaaaagtacgtaattaatggggagtacacaatagaacgtaagcttttacataatgaaatcattaaattatttctaaatgatcaaccgcagcaagagcaagaacctgaggctatattacttggtggtggttctgctgctggaaaaagctcaattggagagttagtaagtaagggatataaacatcagaaacaaaacatggtttggatagatcctgataagatcaaagaaaaaataccagaatatcaagagttaatagaatccggaaacattgagttaataaaacaagcagcttttttagttcatgatgaaagtagtgatattaccatgaaacttttaaaaatctgcatgaaaagaaaaataaactgtatgtatgatggtacaatgaaaaatgaagtaaaatacaaaaagttaattcaacaattaagactagcaggttttagtattaaagcaattattgtagatgttccaatcaaggttgccttagagcgatccaatttgcgttttaaagtaacaggaagattggtaccccaaagtataattgaagaaagccatatgaaagtagcgactactttttctaaaattaaagatttaatagattgctatactttatatgataatacagggaaggaaccagaagtttttgcttttaaagaatcaaaacgagtaaaagaaattattgttgatgaatgtagaaataatcaatttatcgagaaatcagctcttgttttcaagtgaatatatatcgtttaagttttataagataattaatagatattatcctgacattttattatattattgatataataaatacaggaggcgatataaatggaacttaaagaccttatgaattatattgaagaaaacaaagaagaacattttcatgatttaatcgctaaaaatgaacgggaaattgtaaaaaaagaagaagaagagaaataaaaaatttaaaatagaagagttggccttttgggtcaactcttttgtttttataaatggatataaagttggatttctcaattgttgagtaaaaggaattgcagaatttttctgtagagaaggttgtttggtattgaaaatgaaacagacaatttgctaatcataggagagttttttagtattatattaaatagaaaatagcgtaatgagttaacgctttaggagagagtatatgaatcattttattgttatgcaggggcatacatatcaagaggaaaaaggattagaaattatttggtcacctaaaaaggatagaggcggtaatgtaccacattcatggaaaagaatgatggatgtaaaagagggggatcgaatctttcattatgtaaaagggaatattgtagcagttagtatagctgaagaagattgtaaggaatcgaataaaccatcgattatgaaaagccatgatcaatggaatgatgaaggctatttggtatctttaaaatatcatgagttagaaaaaccaattaatatacgtgagaaatttgaagagatatcgcacctgttgccaattaaatattcaccttttcaatcagatgcaaatggaaaccaaggttatttatatccatgtaatgaagaattagcccttaaattaatggaactaattggtgattcaaacatttataaaatcaatgatgagcaattagagttggcagttgatccggtaagaaggacagaaaacaatacattaattccggttatagctgagacggaatccgaagtaaaagcgaaaatccgaattggacagcaaaaatttagagaggaattaatggagatttggaacggaaaatgtgcattatgcggaataaatttaccagaattgttaagagcaagtcattctaagccatggaaagatagtacaagtatggaacgcttagatccgtataacggtgtactactgtgctgtaatcatgatgctctttatgataaaggttttatcacatttgatggccagggacgactgcatatttcctcattaatagtggaaacagattatttgaaatttggattaataccaaaagctaagataggaattcaaccggagaataaattatactttaagtggcataagaggaatatttttaaaggaaaatagtataatttttaacttcaaggacaggaagaacataagagagacgaattgggttatccagtaaaggggaatggtacatgtataactgtaatcaatgtgggacagaaatgattatgcaattacaagatagatatagagaatagtgtcccaaatgtgaagggcttaaaccaaataacttggtatactataatctatatgaattactagattatatggaagcgaatcgctacatgagtaaggaaaatatgctacataattttttgaagtgggagtttgatttaacaaaagggaatatatttaagttatatttaggcgtagatcaatatgatcaattcaatgatgaggatttcacaagacgattagaggactatatgaaggggattcgattaaaattaaatgttaaatatgaagatgattatatctggattaaggttaattagatggaattccagatgtaatgaattttgttttaaagagatagtaagtaattgagaggggattaatggtgatggaagatttgcaaaatgcagtaataaaatttcgagatgagagaaattgggggcagtttcataatgcgaaggatctagcaatctcgttaaatttagaagcatcagagttgcttgaggcttttcaatggaagtctagtgaagaagcaacagagacgaaaatgcaggacataaaagaagaaatggcggatgtaatgatttatttacttatgctaagtgataaattaaatattgatctagaagaagtagtacatgcaaagttggaaaagaatgcagagaaatatcctgtagaaaaagcatttggaagcaataaaaaatataacgaactgtaaaactataatcgttttacagttttttgaaatgcttatgagaaagcagatggttgagatcatgatttgatgtatggattgtattttaaaagtatgaaatccatacatccttaagtattattaaaattaaaaagtagggagttattcaaatgctatcatttgcagcaaaattatcttcattttacataattaaaaagaagcgaaaagagtttgagcaaggttatattagagaccctaaaatagatggaataccagtagtttatattcaacgagataaaaagaatttatatgtaggtaaatccacagatatttatggccgtttcattgcacatttaaatgatgaagataaaacattcaaggaagttattgtgataaagagtgatttatttaatgaaagctcaattaaacatattgaaacattattaattgaatatttattagcggatgaaaaatttaacttactaaataaagtcagaggacaaaaaattcattcctataatggaattgaaaatgttgaaaatatgtttggagaaatttgggctcagttaatgaaagaaggtatagctagtgagaatttaggtgagatacataataaatttatttataaatattcaccatttaaagagttatcggctaatcaaattgaggtttgtaaagacatttttaatacaatgcttactacatcaaatagtcgacatttgattacaggggacccgggtactggtaaaacaattgtattaacaaacatcttatatgcgcttgcttatgacagtgaaactggtaaagtgagagagggattgaattataaggatatagcacttgttgttccacaaaatcactcattaaatttatataagagcttgatgaacaaactaggtctacaaagtattacagtactgtcaccttcacaatttattaagcaggcaaaaagtagggacacaaaatataaatatgtttttgtggacgaagcacatcgtctaaaacaatattttggtaaacaagcacgtgatttaaaacatttagtcaccgataatggttatacaactgagttggaattaatagaaacatttgcgtatcacttaactgtggtttatgatccataccaaacaattcgaccagcagatataaatacagatgtattccagcagttgacagcaaattataagaggcatcccttacataaacaattccgtttaaaatctggagatcaatatttagcatggcttcgtaaatatttacaaatagcaaataatgttggagtgtatgaagaagggttattgcggggctatgattttaaggtaatagactctattacagaattgaatcaatctatgaaaatgttaaatgaaaaacatgaattatgtcgtgtagtcgcgggttattcttggaaatggattacacagaaggacaaaaatcattatgatataaaagatcctgttacaggtgagacattcaaatggaactcaaaggtaaaaggttggattaactttgagaatagtatagaggaaataggatgtatacatactacacaaggtgcggatttaaattatgttggtgtgattttaggagctgaaattgattgtgattacgcaggtgaagaaaatggagactatgatttaaataaggctaagattgtagtgaatccaaaagaatataaagatcgaaacggtcttccaattaagggaacagatataaataatgaggagttaacatcctatattaaacgtatttattatgtattattatctcgcggaataaatggatgttatgtctatgcagtaaatcaaaatatgcaaagatatttaaaggagatagcaaaagtaagtcaataattatgaaaaggggttacctttaatgtggtagtccctgccaattagatagcattttataagtatttaaagagccttactacacataaattgtagtaaggctcttattatctctatagaaataaggattagaaaataacttatcccctcggaagaaaaaagactttattttaacttccctattgataggttaacacgataattcccatattttaatagtcgacctagaaagttatccaattcttcattagaagaaaaatgtgtttttaataaataacatccttcaccacttacacgatgtacttcagatatttcttcttctttttgaaagaaatccataaattcttgatgattagctgatgtgacaaacaaagtaacaaatgcagtcacggtttgtcctagtttgattcggtttatagcgattgtatattgttcaataatccctaaatcctctaatctcctaattcgatttcctacagcctgcccagtcatatgtattttttgacctagttctttccattgtattcttgagttttctcctaataatttcagtatctcaaaatctgtttgatcaataatataaaccaatcctttcatcgtgaaagtagaaaagcagaaagtgtttcgccaacttattcagcttatcgatacaattcactatactaagtttatcctcttacatcgcattgtttattagttatatttacttataacacagaggacgcaacaaaaaaatacatctagatttaaaggaggttacaaatatgttattacaagatattttatcattcaatgaaaaatttgtagaaaataagaaatacgccccccgtgaagcaacaaaaatgcctaagaaacgtatggttgttgtttcttgcatggatgctcgtttaattgagctacttccaaaagctttagatatacacgatggagatgcaaaagttatcagaaatgcaggtggtaagattgcttctcctttcgatagtgttatgcaaagtgttgtagcatcagtatatgatctaaatgcagatgaaatctttcttatcggacaccatagatgtggtgcaagccaaactaatcccaaaggaacacttcaaaaaatattagatcgtggagtagcttcaccagaaattttagcagcaattgaatatgctggtgttgaccttgaaaaatggctatttggattcgatgatatctgtgattcgactcaagctaatgttgatttagtaagaaatcatccacttattccaaaagatgttcctgtacatggtttagttattgatcctcacacaggtaaattagatgtagtagttgatggatataaaacattaaatggtatgaaacattaatcattacttaaatgaagggaagttattaaatatgaatagacaagaagctacgcaaaaaattatggaagcaaaaatcgcaaaaggtttaacatgggaagaaatttcaaaagtaagtgaaaactctgagacttgggttgtaacagcattattagggcaggctacaatgacacgtccggaggcagaaaaaatcggtaaactattagaattagatgaagaagtagttcaggcattaacagtagttccacttagaggtcaagtaatgcaaatgcctcctactgacccaatcttatatcgattatatgaaatgatgttacaatacgcaccaactcttagagaattaatcttagaaaaagctggtgaaggtgtaatgagtgcaattaacttcaatttaggtgtggatacacaagaagatccaaaaggtggcgatcctcgtatcgttattacacttaatgggaaattcttaccatttcgtgcatggtaattaattaaaaatctatctatacaattaaattgattttacagatttacaaaatccatcctttttaatctaactgtgtagaaaggatggatttttactatgagattctttttcagtaaaggagaataatatgaataaaaaatactttaatacaagctttagtattctacagtggtttgtgtttctattagcaaatgcaattgcattgcctatcattattggtggcatattccatttatcagtagaagatatttcaacattaatgcagcgaacttttttagtcgtgggaataagttcatttatacaagcatggtttgggcatcgctatcccatagcggatggtccagccggttcatgggtaagtatatttgtcatactgggacaagttgctatgcatcagggacaaagtgcaaaagacgtgttgcaacttttagaaggtgggttaattattgcaggtatattactcttcgttcttggtataacagggcttgttcatcaaatcttacgtttatttactcctttagttacagggacatttcttttaattttagcacttcaacttagtggtgtgttactaaaaggaatgatgggattacaaggatctgcaactcatcctgattatccaacagctattattgcgctctttgtttttgcctttattactttcttatcaattaaagggacaggatggatgaaaaggtacgctgtgttacttggaatttcatgtggttggcttttgtatactcttttaggagaatcatcttatatgcctacacatacaacgctagttaagttaccagagatatttgcttggggcacacctagattggatattggaatgaccctaactgcaactttatttacatttcttttagttgcaaatacaattgctgctatttcagctgtaaaacaagtagctcccttatctaaagaaaatgaaaagcaaacattgaaccgtggtgtatgggtcggaggtatatcacatattatctcgtcgttgttttctacaattggtattgtaccattacctgcaacagcaggatttattcaattaacaggacaaagaaagttgaagtcgttccttatagcaagtcttatattagcaggaatttcttttgttccctcaatcgtaagctttatatccttgcttccaggccctattgccaatgctgcacttttagcaacatttgtccaagtaataggcatttcatttcaatcaattttaagcgaagaattaaatcaacgccgattaacaatattaggaattacattattaatcagtttaggaataatgtttcttccagaaagcgcatttagtggcattccttcttccttacaatatgttttaaggaatggattgctcgtgggtaccgtgattgtcattctattggaacagttttggaaagaataaagtatttatatgcttttttatttggaagaaaataaagaatgaaaatcagcatttggaaatattttaaaatatcttgatataaacctatgtattttgtaatatataggtatattgttagtttatttgattccgttcattcccacaccttatgtgttgtggttgagttgtagaagtaagtttttttcttactttaattttgaaagggcttctttgagccgattagtgtaattagcttattttgctatgcacaattaatcgacttgaggaggccttttttgtttgggtttaaacaggtataaatatatatttctgtataaaacaacagattaagataggaaatttatatagggggagaaaacatatgagtaattgatttgtttatcagggaaattggagggatatgtagtttttttacgttaaatgtatacacggatatatgaaactgtggttgtaaaatagatacataatagatttacgaatcgcagcaaaaataattatatagaagttttgtagacgacataaatgtactcattataagaaggatgaatagaattttactgtgaatttttaaaaaacgcatcaattgatacgtttttttattgtaattctagtaaatatgaggtacgatttgaaaggggaaagaattttaatgcatattagctttcaaaatagggagacaaaaaagcacactaattttacaatcggggagattgagcagtacatattagagtttaaagaattaattaaaaataatcgatttacggtttctcgaaatgaaaaaaggaaagagaatagtgaatttttagaggctaataagattaacgctagtaaagtgaaagagattcttcttaatataggagtacgtgatttttgttatgcagttgataataaaaatccaaattttgctcatgaaaaattgtatatcttttgtccacaatatgagttagataattggggacaaaagaagtcggtagacatatatattaagatgaatctaattgaaaataagaacaggaacaaatacatgattgttgtttcttttcataaaaggaataaaccagtcacttatctttttaggtaaagataagtgactaatggttttagaatgagggaggatttttatgttggttttatgtgagttttgtcgagatatggtaaagtattctactaaagatgtttcaaaagtgacagtcattagagggaagcaatatcattatgtaggtaaagaagcaaattgcgaggagtgtaaatctgaaatatttgttcctaacattcatgattataatttagaacaattagatcatgcctatagacaacaggaacagttagttactatttctgaaataagagaggttttagaaaaatataagattggaaaacgtccattgtctttacttttaggttggggagaggttaccctaacaaggtatgtaaatggagatattccgacgaagcagtactcggatatattgaaaagattaggtagagatcaatcttttatgctagatattttggaaagaaataaagatttaattactcaaaaagcatatagagtctctaaagaagcaatcgcgaagctacaggaaaatgatgatattccttctacgcagactacgaaaatcgaggaagttgctaactatttgctatataaaaatgatgatattactcctttagctcttcaaaagctgttatactatgcgcaaggattttgtaaggtgcttactgggacatatttatttgaagatgattgtgaagtaggaagtcatggcccggtatatcgagctatttttaataaatataaagtatatcagtacgacaatcttgaagttaattatgatagtacaaatcaattaactcaaatagaaaaggaaatattagactgtgtaatcaatactttaggttgttatagtgggaagagtttagaaaaaatgattctatttgacttaccatgggaagttgcgcatctagaattagaagataatgatcccggtaaacctattatggaaaaagaagagatagataattgctttaatacaatgaaacaggcatataatttagttacaatttctgatataaagaaatatggcataaaagcatttgaaaatataaacaattcaatgttgtaactatatcatttttaatatgattgatatatgaattttttactgttaatcaggcctctataaaggtattaaaagatagtactaattacaaaaggttaggattgcagaatataaacattattaacacgatgtaaatatgcatattaaataaaaagtaaagtggattgatacattatatggtaaaatgatatatatgaaaacgtcttatgaagtaaattttacgctttggacctttagctcagctggttagagcaaacggctcataaccgttcggtcgtaggttcgagtcctacaaggtccacttataaacaaggagaaagcactcaaatgagtgctttctccttgtttataataaataaaggggattgtgacatgaaaataattgatttagagacagaaagaaaaaagaagggaaaattaatggtaactattccaattatagaactaatatatggagaaaaaggggaaattgaatttaaagtagtgggaaaaaaagttgttccgcaatccatgttagagaattaaactactttcaatttctataggctgtaaggtcgttaagtgggagatttctaagtacggaaacctcgtggattttgattgattatgctatccctgtagttcctaaggctaagagatgagttttctccgttagtatgggagaaaaaggagaaaggaaaggacatagctattgcggttttagatacgggttgcaatattaatataaagacgttattctttcctatgatttttcagaaagaataacgcctttttcattttagagggtattttgtcttgttagcttgatagcgatagggtagcgccatcaaaacgcaaatttcgtacgctaagagaatttggaaagagctaaggttctgattcccttaaaggacaaaacgaaggagaattcctaacaataaagttgtatttacctaggaaaattaatatgctctgaactaagaggtaagatatttgccaaccttcttcatattttttgtagctggagttaaatacaaaatattacagaagtagagacaacattgataattagatttagcccactggtgcgttgtaactagtctaatagtaatctttctcgaagctcactgtattatcgaaaagaattgcgcatgctaatgcattcattgcttattctttagtttattgaatataatgatcctatttctaaaatagaaggatgataggatcaattacttgtcactttaaatttaattaaaaaacaattgtactaacagcatgtagataattgttccacctgctatggagagaagcatttgtctcttccatatgtgaaggattattactactcctactgaaattaattctggagcaccatgattgccggataataagttcagatccttaaaacagtaaataactaaaagacttatgacagctgaaggtagtaccttaccgagatactggacatattgcggagtaggtttatctgatgggaacactaagaagggaaggaaccttgtaatcattgtgcctaaaaccactataccaactgttataacttgttgcagtaaactcattgtcacacggaaacctcctctatgttctctattggtttttttaggatagtaagtactaataaaatcataatcattgcaggaattatgaaattgtttccaccaaaaataattaggctaaatatcgataatcccagtcctacaagagcgctataatgctttttctccctcatccattgttcaacaaaaatcacaacgaaaagtgctgtcataacgaaatctagtccttttgtattgaagtgtacaagggaaccaaaaataccaccaattgcggctcctataccccaatacaaatgattaagcagtgtcacgaagaacataaaccaacccttatcaacaccttttggaatatcaacagtagaattaatagaaaaagattcatcacatagtccaaaaataagataaaactttttcttaccagttcctttatacttatctagcatagaaataccataaaataaatgccgtgcattcaccattaaagtaagaaaaagtgcatgaattggattaaaagcaaccagtaataaattagctgcaataaattccattgatcctgcgaatatgattaaactcattagaattggatatattgcactgaaacccagagagttcatgtagattccataagcaattcctaaaaatacaaaaccagcaaaaataggtattgtataaggaaaagctgcacggaatgcgattcttatttgatttctatttttcatattattcacatccttaatcaagagctttattgcatacaaatttaacacataaaatccatacaatgaataagaaaattgtatgtattacaattttctttagcggaagtgtgttattctaactttaaaataatgctgagtttttatccttgtaatacttttcaaagtttataaatcttaattttaactattaaaatttaccctataaaaatttaatcgtagaggtgaagcatgccagtaaattcatttgaaaattactctatgtcttggaaacctaataaggaactattaaagcgtccgttttattcctctattgcagcactacttgaacatgatattgtaaatggttttttagctccaggaacaaaattgcctccacaacgagaattagcagattttttagatttaaactttacaacaattacccgagcttacaaactatgtgaagttaaaggcctaatttatgcaatcacagggagtggaacttttgtagctcctaatgcaactcgttccattactatttctacagaggaaatcagaaactgtattgatcttggattagtagcatcatttgagcaaactaatagtattgtcgcagagactattcaaaaggtcgtagataaacagtatttagagcaactattaaattacaatgatccaactggtcttccgcaccaaaaaacggcaggtctcaattggatgaagtctttcggcattaatgtggatcaggaccatatagcaatagtttcgggggcacaaaatgctttagcaattacattgacagcgttgtttaaacctggaaaccgaattgcaactgatgtatacacctattcaaattttatcgaattggcaaaaatgctacatattcaattagtacccattcaaggggatgaatttggaatgctcccaagtgaactcgataagcaatgtagtcaattagatattcatggtatttttttaatgccttcttgctctaatcctactacgattatgatttcagattttcgaaaaaaagagttagcagcaatcattcgaaagcatcaaataattttgattgaggatgatattcatgcatttttgacagcaggggttatttctgattatgagcaaccaatgtttaatttacttccagaacaaagtgtttatattagtggaacttctaagtgcatttgttcaggattaagggttgcttatatggtattcggagatgccttacgtaaggatattttaaaggctatatttaatgtcaatgttaaaacatcttctttagacgtagaggtgataacagagctagtgttatcaggaaaagctcatgaaattgttaagcagaagaaatttttagcagagtctgcaaacgaaatttattcaggatatttttcttccaacaagcctgtagggcatccttttagtttttaccgttggctacctattcaaaatcattatgatgcatttcaattagaaacagatttggagaggcacggcattcgggtttttcattccgagcgctttattacagcacaaaccatgcctaatcagtatttacgagtcgctctatcctctacaaactcattagaagagttgaaaatagggctagaaatactaaaacaatatctcggctagtgtgaactacccgccacttaacgtcctaacggactgtttgaagtgggggcttctcggttagtcgttacttttggtagctcccttggatttataggtacatcccgtccctaaaaacctaacttaatcatacgagggagatgttcaataatggaaattagaaaaaaattagttgacccaagtaaatatggtacaaagtgtccgtatacaatgaatccagaattcattacagtccacaatacgtacaacgatgctacagcagaaaacgaagtagcttatatgattcgtaatgacaaccaagtatcgtttcatatcgcggtagatgataaggaagctgtacaaggaattcctttagagcgtaacgcctggcatactggcgacggtaacgggaatggtaatcgtaaatctattggggttgaaatttgctactctttaagcggtggagatagatattataaagcggaagacaatgcaactatcgttgtagctcaactaatgaaacagtacaatattccaattcataaagttcgtacacaccaatcatggagtggaaagtactgtcctcatcgtatgttggcagaggggcgttggaataactttattgaaagggttcaacatgcatataatggaggtagtagtctaattaacctaactcctactccatctttcagtggtgaaacaggtattgcatatatcggaggaaatagcgttaatcttcgtaaaggtccaggtactggatacgggattattcgtcaattagggaaaggagagtcctacaaggtatggggacaatcaaacggctggttaaaccttggtggcgatcagtggatttataatgattcatcatatattggttatagtggagaaagtacaccgacaactgcacaaacagtcaatgatggggtaggagtagttaccattaaagcggatgtattgcgtgttcgtaaaggtccaggaactaattatggcattgtaaaaaatgtgtaccaaggggaacagtatcaggcgtggggatatagagatggttggtataatgttggaggagaccagtggatttcaggtgaatatgtgaaatttgaaagataaaacatattatgtaaaagcaaatgcaacctatgtgcatgtgaagtaagagagaagtcggtccttatgataggaaccgactttttttgctaatatgtatctttaaaattctgaaaattatgtagaaatattcttttttattcttttttctacatttttttgttaccctttaatgtaagactattcagaaagaaggaagtgattttatgaatgctccagtgaaggggaatgaacaagttacgaaattacttaatgactggtatcaagcaatgttaacacaacagtatgtaaaggcgtcaaacttgaaagaaaaaattgatcatttaattaataatttacagcatgaaaaagacacagaattacaagaccaaaacttattattatattactctctactagattttaggtataaggttctaactgaaggtattaatatttcaccaagtgaatttgatgaaattgagaacttcaataaaccagtagacaattatttagcgtattactatcacttttataaagcaatacataatacatttttgtctaattatgcagaggctggggaacaatttgaagaagcagaatcacttctaaaatatgtccctgacgaactagaacaagcagaatttaattaccgtttagcaacattctactatcaaacatataagccccttccctctatagcgtatataaacaaagcaaaaacagctttccataataatgaaggctatgagataaacgtagcattatgtgaaaacgtactaggattaacatgtatacagataagacaatttgaacaggctgaagaacacttaaataaagcgatagatattgttaaaaagggtgataacacagaactgttattacgtcttagaaacaatataggatggttatatgctagccaggggctttcggctttagctatccgccacttatcagaaataactgaacatttaccgaaccattataaggctatctttctacaagctaaggaacactataaattgggggaacatacagcggccaataggctaatagaacaggggttaagaacgtctactaaaatagggaatcaagagtatatacacagatttaatatattaaaggaattgaataacaaatctgatttaaatacattagaaagtgtaatagaagcaggaatttcctactttgaagtagaagggttaacaaagtgcgttcaagaatatgctgaaattctcgctactatgttttataaagaagcgaacgacaaaaaagcaagtaaatacttttatatcagcaatgaatcaagaaaacaatttgaagaaaaaggggcgttagtgtgatgaaaaagttaaagtcagtattattacttcccattatggcagtagggtttattgcaatggctgaaggggatacacctgcaccacaaagacctgatttagcatatggtgaggggcatattagtggtataagtaaattagaagcacacggggatcatggcggtgcacccgcttacgaccacggaagaccgcctgcaccagcgtatgaatatgtgaaataacaaaaaagccaactttatttatataatagggttggcttttttggtgctatgatgtttagaatttacttttagataatgcctttaatatcggatttataattctacttattaaacgaaatcccttgaatatagagctaacaactttcataatgttagaatctctttttattttaaacacctactttcgcaattccgcttgtagaataaagttttcttttatactacctttatatgtataccttattttattcttttgataaacctttgtatgatctttgctaaatactgtttcgtcactaagaccaagttcttgtttaactaaattacgttctccaaaactcaatgaatcatctaccgttcctattaataataagaaagcgaatttgaaatctttttgctcagtaaagaaagcatttggtgtcatagctagcgaagcctttttaatatgtttattcttatcggtgtctaagaagataaaaatattatttgataaaccgattgaggttctgccatcttctaatacttcagttgaattaattttcaactttgttttttctcccatttcttttaatgctttttctattctttgtttgtattcatctactgttaatttagtttctttattttctgcaatcgcaggtttagtgctatcctttttattgccactaacaccagcagcaacaaaaattattaatagtgcagtaataatccaaacccaccattttttataaaacggttttttcatataatttccctccatagatttatacctaaatcataccaatttcatgcaacaactgtaaatggttaagtttctggtttgttgacaaaacagaacgattgttctattatttttatacaaacaaacgttcttgtggaggtcatcttatgaatcatttacttaaatgctctttcaatcaaaaaataccaattgaattaatatatttaaacggttcaggagatttctctcaaaggactgtgattgttagaaaagtatatgaagatcgtatattggtgtattgcatgaaaaaacaacaagttagaacactgaaattagctaatatactatctgttgataaagtaagaaataactatcaatacgcttaaaacacttaatgaggtgattatcatatggcaaacggagtaccaaaaccaccaaagaagaaaagtgcttcaaaaaaggaacctagaccatacatggatgaattcgaacagcaagaagctgctgaattaattcaatatgcaaagcaggatgatacagaattagtctttactgtgtatagaaaatataaagaaccagatatcattcaaggaaaaatcgttaaacttgaacaacaaatgggtagaattgtagtgagtaatggcccgaatataatacataaaattcaattcatggatattttgaaaatcgaaacgcctagttaatttagctaggtgtttttatatggccataaattctttatcaaagtagaacttgtccattaagttgtttacaattccgttgaaataagcgaatttacccttgttcatttttgttcccgctttaattttcataacaaactctttgatagcttgtaagccaatagtaagttcctggtctttagtaaatgctttatcacctgttatatggttaacgattttattacactgtcttacgaccttccacagttcttgaattgttttagattcactgtaaaaagagccaactaaagaaataaaacgctctggtacccaatgagcaacaaagtcagcttgttccatattctcttctggagtattgctattctcattactattacgtttatttatatcttttatattttgttttaaggaaatagattttgttttattggtgtgacactttttttcatttttaacaggtgcttgtgtgacaacctgttcctccacaatgattggttgaataacaatagcgttacatgtttgtctcatatcgattttacgcttcatttctagctgtttaataatacctaaagactctaggtgtaggcatactctaataaccgttctacggctaatattaaggtcttcagcgatgtgttttttcgttctgaaagatacgccaaagaacttagaagaatagttgtgtaatttatttaatacagttaattgagttttgtttaactgatcggcgaatttctctttgtacgcccgaacagttttatttaattcatcaatagttttgaatgttgctagatttttatatgtttcattacctgcaataattgtaattccttgtttcttttccatagtggtttgtctcctttttggaaacaaaaaagcaacgtcaccaatttggtaaacgttgcttaatagaccctgcatgatgtaaaatagctcatgagagtatagcaagtgtttacctggcctaatcaggtggacggtatatagagtgttcgtagcactttacatacacgctgtgctcttttgttttgtgtagattttgcacgctgaaataattttgcatgaattttgcacgattacttctggaaatctaaaggagccttgatataaaagggatgttttactattagttcgaatccctctgggcgcgtcaaaaagtcctaacttacgttttgtaggttaggactttttttatttacctcttgttatatctagtaataagatttactattagtacttgataataatttttaattttattattttctttcaatattattcaaatttcggttgtaagttgtaaatctcattaatacatataaattaataatattttggaatgggtgtctgcgtgaggattctccttttaccaaacttattgtacaatagaaacaagggggagattagtttgaaggcaagtcttttacaagaacaaagcttacgtttggcaatgacacaagagttaaggcaagcgattacaatgctccagtataatgtacaagaattatcggagtttttgtatgagcaatcgttagagaatccccttattgagttaggtggttttgagagggagaagaaaaagagctctaacaacagtaaaagtaccagcaaacaagtcgagaatcagatggagatctacagtgtggattctacaacgattcagcaacatttattaaatcaaatacagtattataaaatagatgaagaagagcgaaaagtagcttctttcattattatgaacatggatggaaatggatatttacaagaaacgaatgaagagttagcagagctcctttctgcacatattcatgtagtcgaccgttctgtagagcttgtccaatcactggagccagcaggggtaggggcgcgtaatattcaggaatgtttaaccttacaattgaagcgcttacaaagacgtaatggattagcagaagaggttgtagaagatcatttcgcttattttgtgaagaaagattggcgaaagctcgttcaagtgttgaaatgtagtaatgaggaattgcagagtgcggtaaattgtataacgtcattacaaccaaaaccaggtcttgcgttttcttcagataaaccactttacattgtacctgatatggcggtgaaaaaagatggcgatcgcctcgttttacaaatgaatgagagaaatatgccgagaattgaaattcattctgaatatagtgcgcttcttaataatagtgaaagtgaagtagcatcttacgtatcagaaaagtatcagcatgtgcagtggattatgcgcagtttgaagcagagaaaacagacattgctgcaagtaatgactattattatggaaaaacaacgtgatttcttctggaaaggtccagagtatttaagacctctcgctttaaaagaggtagcggaagagttaagtgtgcatgaatcgacaattagtcgtgcgacgcgaaataaatatgtgcaaacaccacacggtttatttgagatgaaatcgttctttagcaatgccgtttcgacgactgaagatgaagcagtttctacaaaacgtgtaaaacaatttattcaaacgctaattggggcagaggataagaaaaagccactttcagatcaaaagatttcaaaattattagaagaagagcatgaaattgttatttctcgaagaacagtggcgaagtatagagaacaaatgcatatcccagcttcgtcattacgaaaaacgatcggataggtgaagaagatgaaagttgtactgtatactaaaaaagattgtggcctttgcgtgaaggcgaaacaagttttacaggaagtacaatgtgaatattcttttcaaatcgaggaaatagatatatatgaagataatgaccttttagaaaaatatcacttaatgattccggttgtagaaatggacggaaaacaagtagaatatggtaacattcacaaaggtgtcataataaactatataaagaatgcagttaagagttgaataagtttctatctcctgttacaataatacacgtagcagggattatttttttaacctatgtgggacacaaaatgtcactacgggacgtaaagtgaccacgagggaaaatgaaccgatgtagtgaggagaaaagatatgcgctcatggattcagaatacaaaaaaattattacctgatctgctacctgttatgcaaacgagaatgcaaattcttcaatacattaggctcatgcagccgattggaagaagaaacttatcagcaagtctcggtatgacagaacgagtattgcgaagtgaagttcaagttttgaaagaacaaaacttagttcacgtcgcttcttctggaatgactttgacagaagaaggaacagctttagttcttgctttggaagactttatgaaagaaatttccgggttaaaggttttagaaaagcaacttaaggaaacattagacttggatgaagttttcgttgtccctggtgatagtgatgaatcaccttgggtcaaactggagatgggccgtgcttgtgtgacttgtataaaagaccgtctgacagcgaataatatcgttgctgtggctggaggaactacgctagctgctgctgcggacatgatgcaacttgattgcaaagatttacatatgctatttgtcccagcacgtggtggaattggagaaggtgttgaattagaagccaataccatttgtgccaagatggcgcaaaatacgatgagtaattatcgcttattgtatgttccagaccatgttagtagcgaagcatatgcgtctattgtgacagagccttccgtgaaagaagttcttgagttgattcgatcttccaatatcgtcattcatggaataggtgatgcgttaacaatggcacgtcgcagaagtacttcagaagcagattggttaaagattcaggcaagcgaagcagttggcgaagctttcggttactactttaatgaagaaggaaatgttgttcataaagtaagaacggttggtatgcaactagaggacttacaaaatgtatctcacgttgttgcagtcgctggaggttcttcaaaggcaaaagcaatacaggctgtaattaaacaagggcacacttcaattctaattacagatgaaggtgcagcaaaacagttaacaaagggttttaccctttaatataatcccccaaggaggaaattcaaatgactaaaattggtattaatggatttggacgtatcggacgtaacgtattccgcgcagctcttaacaactctgaggtagaagtagtagcaatcaacgacttaacagatgctaaaacattagctcaccttttaaaatatgacacagttcacggaactttaaatgcagaagtatctgctaacgaaaacagcatcgttgttaacggtaaagaaattaaagttatcgctgagcgtgacccagctcaattaccatggagcgactacggagtagaagtagtagtagaatctactggccgtttcactaaaaaatcagacgctgagaaacacttaggtggatcagttaagaaagttatcatctcagctccagcttctgacgaagatatcactgtagttatgggtgttaaccacgaacaatacgatgcagctaaccacaacgtagtatctaacgcttcttgtactacaaactgtctagctccattcgctaaagtattaaacgaaaaattcggcgtaaaacgcggaatgatgacaacaattcactcttacactaacgaccaacaaatcttagacttaccacacaaagatttacgtcgtgctcgtgcagcagctgaaaacatgatcccaacatctactggtgcagctaaagctgtagcattagtattaccagaacttaaaggtaaattaaacggtggcgctgtacgtgttccaactgctaacgtttctctagttgacttagttgttgaacttgacaaagaagtaacagttgaagaagtaaatgcagcattcaaagcagcagctgaaggcgaattaaaaggtatccttggatacagcgaagagccattagtatctatcgactataacggatgtacagcttcttctacaatcgatgcattatctacaatggtaatggaaggtaacatggttaaagtactttcttggtacgataacgaaactggttactctaaccgcgtagtagacctagcagcttacatgacttcaaaaggtctttaattcttaattatataagttatcaatgacaaaacgagggagagggtttgttccctctctctcttctttcgttttaaaagcaaatgtgttaagcttttgagtgggttttgtcaatcctaactagtagtcggagggaaatccaatgaacaaaaaatcaattcgtgacgtagatttaaaaggtaagcgtgtattttgccgcgttgatttcaacgtacctatgaaagaaggcaaaattacagatgaaactcgtatccgtgcagctcttcctacaattcaatatttagtagagcaaggtgcgaaagttattttagcaagtcacttaggccgtccaaaaggtcaagtagtagaagaaatgcgtttaactccagtagcagcacgtttaggcgagcttcttggtaaagacgttaaaaaagcggacgaagcattcggaccagttgcacaagaaatggttgcagcaatgaacgaaggcgacgtattagttcttgaaaacgtacgtttctatgcgggcgaagaaaagaatgatgcagaacttgcgaaagaatttgcagcacttgctgacatcttcgtaaacgatgcattcggtgcagctcaccgtgctcacgcttctacagcaggtatcgcagactacctaccagcagtatctggtct
